(19) United States
(12) Patent Application Publication
(10) Pub. No.: US 2025/0195589 A1
(43) Pub. Date: Jun. 19, 2025

(54) VAGINAL LIVE BIO-THERAPEUTIC COMPOSITIONS AND METHODS OF USE THEREOF

(71) Applicants: The General Hospital Corporation, Boston, MA (US); University of Maryland, Baltimore, Baltimore, MD (US); Centre for the AIDS Programme of Research in South Africa, Durban, KwaZulu-Natal (ZA); University of Cape Town, Rondebosch (ZA)

(72) Inventors: Douglas Kwon, Somerville, MA (US); Jacques Ravel, Laurel, MD (US); Caroline Morrissey Mitchell, Lincoln, MA (US); Michael France, Catonsville, MD (US); Jo-Ann Passmore, Rondebosch (ZA); Sinaye Ngcapu, KwaZulu-Natal (ZA); Fatima Hussain, Somerville, MA (US); Anna-Ursula Happel, Cape Town (ZA)

(21) Appl. No.: 18/842,931

(22) PCT Filed: Mar. 1, 2023
(86) PCT No.: PCT/US2023/063490

§ 371 Date: Aug. 30, 2024

Related U.S. Application Data
(60) Provisional application No. 63/382,704, filed on Nov. 7, 2022.
(60) Provisional application No. 63/315,503, filed on Mar. 1, 2022.

(51) Int. Cl. A61K 35/747

(52) U.S. Cl. CPC A61K 35/747

(57) ABSTRACT

Described herein are vaginal live biotherapeutic compositions for treatment of vaginal dysbiosis or conditions/disorders associated with vaginal dysbiosis. Also disclosed herein are methods for treating vaginal dysbiosis in an individual in need thereof, methods for reducing the risk of vaginal dysbiosis in an individual in need thereof, and methods for restoring Lactobacillus dominated microbiota in an individual in need thereof.

### CLAIM OF PRIORITY

[0001] This application claims the benefit of U.S. Provisional Patent Applications Ser. Nos. 63/315,503, filed on Mar. 1, 2022, and 63/382,704, filed on Nov. 7, 2022. The entire contents of the foregoing are hereby incorporated by reference.

### SEQUENCE LISTING

[0002] This application contains a Sequence Listing that has been submitted electronically as an XML file named 29539-0653WO1_SL_ST26.xml. The XML file, created on Feb. 27, 2023, is 37,123,905 bytes in size. The material in the XML file is hereby incorporated by reference in its entirety.

### BACKGROUND OF THE INVENTION

[0003] Vaginal colonization with a Lactobacillus-dominant microbial community is associated with lower risk for preterm birth, HIV acquisition, HPV persistence and cervical dysplasia.¹⁻⁵ Determinants of vaginal microbial community stability and Lactobacillus dominance are unknown—is it host factors, environmental influences or microbial inoculum? Some women have an optimal, stable, Lactobacillus-dominant microbiome, while others fluctuate between this “optimal” state and a more diverse community such as the vaginal microbial communities of women suffering from bacterial vaginosis (BV), putting them at higher risk of adverse outcomes.^{6, 7} The absence of an animal model for the human vaginal microbiota means that untangling the many potential drivers of vaginal microbial colonization is difficult.⁸

[0004] Worldwide, 25-30% of women have BV, which is associated with increased risk for preterm birth, miscarriage, HIV acquisition and cervical dysplasia-conditions leading to billions of dollars in health care costs annually.^{1, 9} Furthermore, the prevalence of a diverse, non-Lactobacillus dominant vaginal microbiota is higher in sub-Saharan Africa than the US^{2,3}. Within US cohorts, Black women are more likely to have a diverse vaginal microbiota³. L. crispatus dominance is much less likely in young sub-Saharan African women, as well as US Black women. The reason for these differences is unknown.

[0005] Although antibiotic treatment of BV reduces the absolute burden of BV-associated microbes, it has a one-month cure rate of 40-70%, demonstrating rapid and frequent recurrence.¹⁰⁻¹² BV is characterized both by increased diversity and quantity of species in the vaginal ecosystem, and by the absence of vaginal Lactobacillus colonization. The two most commonly identified vaginal Lactobacillus species are L. crispatus (considered beneficial) and L. iners (considered less beneficial and less stable than L. crispatus).^{1, 13, 14} Antibiotics reduce the burden of pathologic, BV-associated anaerobes and short-term cure rates are as high as 70%, but treatment has high rates of relapse.

[0006] After antibiotic treatment, the vaginal community is more often dominated by L. iners than L. crispatus.¹⁵⁻¹⁷ Oral probiotic strategies to recolonize with beneficial Lactobacillus species have had small or no benefit.^{15, 18, 19} Delivering exogenous L. crispatus to the vagina using, one, single-strain L. crispatus live biotherapeutic product (Lactin-V) has been studied. In a Phase 2a trial, Lactin-V colonized 50% of treated women after 5 daily doses, but 18 days later colonization dropped to 44%.^{20, 21} In the Phase 2b trial, after 5 daily doses and then twice weekly dosing for 11 weeks, 79% of women were colonized in the final week of treatment, but this dropped to 48% after an additional 12 weeks with no treatment.²² Women treated with Lactin-V had a significantly lower risk for recurrent BV at both 12 and 24 weeks. These results suggest that 1) vaginal inoculation with L. crispatus can decrease recurrent dysbiosis, and 2) inoculating a single strain is insufficient to establish durable colonization of 1 . . . crispatus in some women.

[0007] An effective clinical intervention to durably shift the vaginal microbiota to Lactobacillus dominance—and ideally, L. crispatus dominance—would allow improved clinical treatment of women with recurrent BV, which is associated with adverse health outcomes and has a significant negative impact on quality of life.²³ In addition, if such an intervention promoted durable L. crispatus dominance, it could potentially be used to decrease rates of adverse health outcomes, including of preterm birth,^{24, 25} HIV acquisition,¹ cervical dysplasia,^{2, 3} post-operative gynecologic infections²⁶ and increase the success of in vitro fertilization²⁷ and spontaneous conception, all of which would provide a significant public health benefit.

### SUMMARY OF THE INVENTION

[0008] It has now been determined that optimal combinations of L. crispatus isolates can be formulated into a live biotherapeutic composition and administered to promote a vaginal microbial community dominated by beneficial Lactobacilli (i.e., to establish non-L. iners Lactobacillus dominance) which is crucial to reducing risk of acquiring recurrent BV.

[0009] Disclosed herein are methods for treating or reducing the risk of vaginal dysbiosis in an individual in need thereof, said method including administering a vaginal live bio-therapeutic composition to the individual, wherein the vaginal live bio-therapeutic composition comprises two or more Lactobacillus crispatus strains selected from FF00051, C0022A1, C0175A1, C0059E1, FF00018, UC101_2_33 and combinations thereof, thereby treating vaginal dysbiosis in the individual. In some embodiments, the vaginal live bio-therapeutic composition comprises two Lactobacillus crispatus strains selected from FF00051, C0022A1, C0175A1, C0059E1, FF00018, UC101_2_33. In some embodiments, the vaginal live bio-therapeutic composition comprises three Lactobacillus crispatus strains selected from FF00051, C0022A1, C0175A1, C0059E1, FF00018, UC101_2_33. In some embodiments, the vaginal live bio-therapeutic composition comprises four Lactobacillus crispatus strains selected from FF00051, C0022A1, C0175A1, C0059E1, FF00018, UC101_2_33. In some embodiments, the vaginal live bio-therapeutic composition comprises five Lactobacillus crispatus strains selected from FF00051, C0022A1, C0175A1, C0059E1, FF00018, UC101_2_33. In some embodiments, the vaginal live bio-therapeutic composition comprises the Lactobacillus crispatus of FF00051, C0022A1, C0175A1, C0059E1, FF00018, UC101_2_33. In some embodiments, the two or more L. crispatus strains are selected from 122010_1999_16, C0022A1, C0175A1, C0028A1, C0006A1, FF00018, UC101_2_33, UC119_2_11, 185329_1999_17, C0112A1, FF00064, FF00051, and combinations thereof.

[0010] In some embodiments, the vaginal live bio-therapeutic composition also includes at least one additional (e.g., one additional, two additional, three additional, four additional, five additional, six additional, seven additional, eight additional, or nine additional) Lactobacillus crispatus strain(s). In some embodiments, the vaginal live bio-therapeutic composition also includes at least one additional (e.g., one additional, two additional, three additional, four additional, five additional, six additional, seven additional, eight additional, or nine additional) Lactobacillus crispatus strain originally isolated from a vaginal tissue sample obtained from a female individual (or individual with a vagina) having a stable Lactobacillus-dominated vaginal microbiome. In some embodiments, the at least one additional (e.g., one additional, two additional, three additional, four additional, five additional, six additional, seven additional, eight additional, or nine additional) Lactobacillus crispatus strain is selected from C0028A1, C0006A1, C0112A1, FF00004, UC119_2_11, FF00064, 122010_1999_16, 185329_1999_17 and FF00072, and combinations thereof.

[0011] In some embodiments, the vagina dysbiosis is bacterial vaginosis (BV).

[0012] Also disclosed herein are vaginal live bio-therapeutic compositions that include two or more Lactobacillus crispatus strains selected from FF00051, C0022A1, C0175A1, C0059E1, FF00018, UC101_2_33, and combinations thereof. In some embodiments, the vaginal live bio-therapeutic composition comprises two Lactobacillus crispatus strains selected from FF00051, C0022A1, C0175A1, C0059E1, FF00018, UC101_2_33. In some embodiments, the vaginal live bio-therapeutic composition comprises three Lactobacillus crispatus strains selected from FF00051, C0022A1, C0175A1, C0059E1, FF00018, UC101_2_33. In some embodiments, the vaginal live bio-therapeutic composition comprises four Lactobacillus crispatus strains selected from FF00051, C0022A1, C0175A1, C0059E1, FF00018, UC101_2_33. In some embodiments, the vaginal live bio-therapeutic composition comprises five Lactobacillus crispatus strains selected from FF00051, C0022A1, C0175A1, C0059E1, FF00018, UC101_2_33. In some embodiments, the vaginal live bio-therapeutic composition comprises the Lactobacillus crispatus strains of FF00051, C0022A1, C0175A1, C0059E1, FF00018, UC101_2_33. In some embodiments, the two or more L. crispatus strains are selected from 122010_1999_16, C0022A1, C0175A1, C0028A1, C0006A1, FF00018, UC101_2_33, UC119_2_11, 185329_1999_17, C0112A1, FF00064, FF00051, and combinations thereof.

[0013] In some embodiments, the composition also includes at least one additional (e.g., one additional, two additional, three additional, four additional, five additional, six additional, seven additional, eight additional, or nine additional) Lactobacillus crispatus strain originally isolated from a vaginal tissue sample obtained from a female individual (or individual with a vagina) having a stable Lactobacillus-dominated vaginal microbiome. In some embodiments, the at least one additional (e.g., one additional, two additional, three additional, four additional, five additional, six additional, seven additional, eight additional, or nine additional) Lactobacillus crispatus strain is selected from C0028A1, C0006A1, C0112A1, FF00004, UC119_2_11, FF00064, 122010_1999_16, 185329_1999_17, and FF00072, and combinations thereof.

[0014] Also provided herein are compositions comprising comprise two or more (e.g., three or more, four or more, five or more, six or more, seven or more, eight or more, nine or more, ten or more, eleven or more, twelve or more, thirteen or more, fourteen or more, or fifteen or more) Lactobacillus crispatus strains or “isolates” including, but not limited to, Lactobacillus crispatus strains 122010_1999_16, C0022A1, C0175A1, C0059E1, C0028A1, C0006A1, FF00018, UC101_2_33, UC119_2_11, 185329_1999_17, C0112A1, FF00004, FF00064, FF00051, FF00072, and combinations thereof, and methods of use thereof.

[0015] In some embodiments, the composition also includes at least one of lactic acid, maltose, glycogen, glutamine and magnesium citrate or combinations thereof. In some embodiments, the composition further comprises at least one mucoadhesive. In some embodiments, the composition also includes at least one antimicrobial peptide.

[0016] Also disclosed herein are methods for restoring Lactobacillus dominated microbiota in an individual in need thereof, said method including administering a vaginal live bio-therapeutic composition to the individual, wherein the composition comprises two or more Lactobacillus crispatus strains selected from FF00051, C0022A1, C0175A1, C0059E1, FF00018, UC101_2_33, and combinations thereof, thereby restoring Lactobacillus dominated microbiota in the individual. In some embodiments, the vaginal live bio-therapeutic composition also includes at least one additional (e.g., one additional, two additional, three additional, four additional, five additional, six additional, seven additional, eight additional, or nine additional) Lactobacillus crispatus strain originally isolated from a vaginal tissue sample obtained from a female individual (or individual with a vagina) having a stable Lactobacillus-dominated vaginal microbiome. In some embodiments, the at least one additional (e.g., one additional, two additional, three additional, four additional, five additional, six additional, seven additional, eight additional, or nine additional) Lactobacillus crispatus strain is selected from C0028A1, C0006A1, C0112A1, FF00004, UC119_2_11, FF00064, 122010_1999_16, 185329_1999_17 and FF00072, and combinations thereof.

[0017] In some embodiments, additional active agents are included in the compositions and methods described herein. For example, a cysteine uptake inhibitor, an antibiotic treatment against BV, or a cysteine uptake inhibitor and an antibiotic treatment against BV can be included.

[0018] In some embodiments, additional active agents are included in the compositions described and used herein. For example, a cysteine uptake inhibitor, an antibiotic treatment against BV, or a cysteine uptake inhibitor and an antibiotic treatment against BV. In some embodiments, a cysteine uptake inhibitor can prevent a bacterial cell (e.g., a cell of a bacterial species contributing to BV), from transporting cysteine into the cell from outside the cell. In some embodiments, a cysteine uptake inhibitor can selectively inhibit Lactobacillus iners growth in vitro or in vivo. Non-limiting cysteine uptake inhibitors can include S-methyl-L-cysteine (SMC) and seleno-DL-cysteine (SDLC). (See, for example, Bloom S M et al. Nat. Microbiol., (2022) March; 7 (3): 434-450, which is incorporated in its entirety.)

[0019] Other features and advantages of the invention will be apparent from the Detailed Description, and from the claims. Thus, other aspects of the invention are described in the following disclosure and are within the scope of the invention.

### BRIEF DESCRIPTION OF THE DRAWINGS

[0020] The following Detailed Description, given by way of example, but not intended to limit the invention to specific embodiments described, may be understood in conjunction with the accompanying figures, incorporated herein by reference.

[0021] FIGS. 1A-1B are graphs that depict similar and low levels of IL8 between all Lactobacillus crispatus strains using conditioned media on End1 cells. JV-V01 is a control strain.

[0022] FIG. 2 is a graph that depicts cytokine induction by Lactobacillus crispatus strains using conditioned media on End1 cells. PIC=Poly(I:C), a TLR3 agonist and a positive control.

[0023] FIGS. 3A-3B are graphs that depict cytokine induction by Lactobacillus crispatus strains co-cultured with End1 cells. PIC=Poly(I:C), a TLR3 agonist and a positive control. KSF=Keratinocyte serum free medium, a negative control. JV-V01 (also known as HMP ID 506) and 33197 (also known as ATCC strain VPI 7635) are control strains.

[0024] FIGS. 4A-4H depict antimicrobial properties of various Lactobacillus crispatus strains and combinations thereof. Antimicrobial properties were determined using cross-streaking assays.

### DETAILED DESCRIPTION OF THE INVENTION

### Definitions

[0025] Unless otherwise defined, all technical and scientific terms used herein have the same meaning as commonly understood by one of ordinary skill in the art to which this invention belongs. In case of conflict, the present application, including definitions will control.

[0026] A “individual” is a vertebrate, including any member of the class Mammalia, including humans, domestic and farm animals, and zoo, sports or pet animals, such as mouse, rabbit, pig, sheep, goat, cattle and higher primates.

[0027] As used herein, the terms “treat,” “treating,” “treatment,” and the like refer to reducing or ameliorating a vaginal dysbiosis disorder (e.g., BV), and/or to ameliorate at least one symptom of the disorder associated with vaginal dysbiosis disorders (e.g., cervical dysplasia, preterm birth, acquiring sexually transmitted infections, post-operative gynecological infections, or unsuccessful in vitro fertilization and spontaneous conception) in an individual in need thereof. It will be appreciated that, although not precluded, treating a disorder or condition does not require that the disorder, condition or symptoms associated therewith be completely eliminated.

[0028] By “effective amount” or a “therapeutically effective amount” is meant the amount Live Biotherapeutic Products (LBPs) that produce the desired therapeutic response (i.e., producing, restoring and/or enhancing vaginal function) and in specific embodiments, “effective amount” refers to the amount of vaginally administered LBP needed to achieve vaginal colonization with a Lactobacillus-dominant microbial community).

[0029] By “vaginal dysbiosis” is meant displacement of optimal vaginal microbiota (e.g., dominated by L. crispatus) by diverse strict and facultative anaerobic microbiota (Gardnerella vaginalis, Atopobium vaginae, Prevotella bivia, Megasphaera spp., among others) and the absence or low abundance of Lactobacillus species.

[0030] By “isolated” is meant a material that is free to varying degrees from components which normally accompany it as found in its native state. “Isolate” denotes a degree of separation from original source or surroundings.

[0031] Unless specifically stated or clear from context, as used herein, the term “about” is understood as within a range of normal tolerance in the art, for example within 2 standard deviations of the mean. “About” is understood as within 10%, 9%, 8%, 7%, 6%, 5%, 4%, 3%, 2%, 1%, 0.5%, 0.1%, 0.05%, or 0.01% of the stated value. Unless otherwise clear from context, all numerical values provided herein are modified by the term about.

[0032] Ranges provided herein are understood to be shorthand for all of the values within the range. For example, a range of 1 to 50 is understood to include any number, combination of numbers, or sub-range from the group consisting of 1, 2, 3, 4, 5, 6, 7, 8, 9, 10, 11, 12, 13, 14, 15, 16, 17, 18, 19, 20, 21, 22, 23, 24, 25, 26, 27, 28, 29, 30, 31, 32, 33, 34, 35, 36, 37, 38, 39, 40, 41, 42, 43, 44, 45, 46, 47, 48, 49, or 50 (as well as fractions thereof unless the context clearly dictates otherwise).

[0033] In this disclosure, “comprises,” “comprising,” “containing” and “having” and the like can have the meaning ascribed to them in U.S. Patent law and can mean “includes,” “including,” and the like; “consisting essentially of” or “consists essentially” likewise has the meaning ascribed in U.S. Patent law and the term is open-ended, allowing for the presence of more than that which is recited so long as basic or novel characteristics of that which is recited is not changed by the presence of more than that which is recited, but excludes prior art embodiments.

[0034] Other definitions appear in context throughout this disclosure.

### Compositions Comprising Live Biotherapeutic Products (LBPs)

[0035] Described herein are compositions and methods of treatment or reducing the risk of a vaginal dysbiosis disorder or a disorder associated with a vaginal dysbiosis disorder (e.g., bacterial vaginosis (BV), cervical dysplasia, reduction in the risk of preterm birth, reduction in the risk of acquiring sexually transmitted infections, reducing the risk of infections associated with oral antibiotics, reducing the risk of post-operative gynecological infections, or reducing the risk of unsuccessful in vitro fertilization and/or spontaneous conception) using vaginally administered live biotherapeutic products. Methods for reducing the risk of a disorder can be used, e.g., in subjects who are at risk of developing a vaginal dysbiosis disorder or a disorder associated with a vaginal dysbiosis disorder. Subjects who are at risk include individuals with vaginas who have a history of such disorders, recurrence of such disorders, are undergoing gynecological surgery, who are pregnant, undergoing in vitro fertilization, or trying to conceive, or are taking oral antibiotics.

[0036] Vaginal Live Biotherapeutic Products (LBPs) as described herein can comprise two or more (e.g., three or more, four or more, five or more, six or more, seven or more, eight or more, nine or more, ten or more, eleven or more, twelve or more, thirteen or more, fourteen or more, or fifteen or more) Lactobacillus crispatus strains or “isolates” including, but not limited to, Lactobacillus crispatus strains 122010_1999_16, C0022A1, C0175A1, C0059E1, C0028A1, C0006A1, FF00018, UC101_2_33, UC119_2_11, 185329_1999_17, C0112A1, FF00004, FF00064, FF00051, FF00072, and combinations thereof.

[0037] In some embodiments, the two or more L. crispatus strains are selected from 122010_1999_16, C0022A1, C0175A1, C0028A1, C0006A1, FF00018, UC101_2_33, UC119_2_11, 185329_1999_17, C0112A1, FF00064, FF00051, and combinations thereof.

[0038] In some embodiments, the two or more L. crispatus strains are selected from C0022A1, C0175A1, C0059E1, C0028A1, C0006A1, C0112A1, and combinations thereof.

[0039] In some embodiments, the two or more L. crispatus strains are selected from 122010_1999_16, FF00018, UC101_2_33, UC119_2_11, 185329_1999_17, FF00004, FF00064, FF00051, FF00072, and combinations thereof.

[0040] In some embodiments, the two or more L. crispatus strains are selected from 122010_1999_16, C0022A1, C0175A1, C0059E1, C0028A1, C0006A1, FF00018, 185329_1999_17, C0112A1, FF00004, FF00064, FF00051, FF00072, and combinations thereof.

[0041] In some embodiments, the two or more L. crispatus strains are selected from C0022A1, C0175A1, C0059E1, C0028A1, C0006A1, FF00018, UC101_2_33, UC119_2_11, C0112A1, FF00004, FF00064, FF00051, FF00072, and combinations thereof.

[0042] In some embodiments, the two or more L. crispatus strains are selected from 122010_1999_16, C0022A1, C0175A1, C0059E1, C0028A1, C0006A1, UC101_2_33, UC119_2_11, 185329_1999_17, C0112A1, and combinations thereof.

[0043] In some embodiments, the strains comprise a six-strain consortium comprising or consisting of L. crispatus strains C0022A1, C0175A1, C0059E1, FF00018, FF00051 and UC101_2_33.

[0044] In some embodiments, the strains comprise a six-strain consortium comprising or consisting of L. crispatus strains C0022A1, C0175A1, C0112A1, FF00051, FF00018 and UC101_2_33.

[0045] In some embodiments, the strains comprise a five-strain consortium comprising or consisting of L. crispatus strains C0022A1, C0175A1, C0059A1, UC119_2_14 and UC101_2_33.

[0046] In some embodiments, the strains comprise a five-strain consortia comprising or consisting of L. crispatus strains C0175A1, C0112A1, FF00051, FF00018 and FF00064.

[0047] In some embodiments, the strains comprise a five-strain consortia comprising or consisting of L. crispatus strains C0006A1, C0112A1, C0175A1, FF00018, and FF00064.

[0048] In some embodiments, the strains comprise or consist of L. crispatus strains 122010_1999_16, C0022A1, C0175A1, C0028A1, C0006A1, FF00018, UC101_2_33, UC119_2_11, 185329_1999_17, C0112A1, FF00064, and FF00051.

[0049] In some embodiments, the strains comprise or consist of L. crispatus strains C0022A1, C0175A1, C0028A1, C0006A1, and C0112A1.

[0050] In some embodiments, the strains comprise or consist of L. crispatus strains 122010_1999_16, C0022A1, C0175A1, C0028A1, C0006A1, FF00018, 185329_1999_17, C0112A1, FF00064, and FF00051.

[0051] In some embodiments, the strains comprise or consist of a combination shown in FIG. 4A-4H.

[0052] Table 1 provides exemplary sequences that characterize these strains. In some embodiments, any of the strains can include additional plasmids. For example, strain 122010_1999_16 can include an additional plasmid (e.g., strain 122010_1999_16 plasmid of SEQ ID NO: 2). Exemplary strain genome sequences and plasmid sequences are listed in Table 1.

TABLE 1
Sequence Descriptions.

| SEQ | | |
|---|---|---|
| ID NO: | Description of Sequence | Strain |
| 1 | Strain 122010_1999_16 genome | Strain 122010_1999 |
| 2 | Strain 122010_1999_16 plasmid | Optional plasmid for Strain 122010_1999 |
| 3 | Strain C0006A1 genome | Strain C0006A1 |
| 4 | Strain C0006A1 plasmid | Optional plasmid for Strain C0006A1 |
| 5 | Strain C0175A1 genome | Strain C0175A1 |
| 6 | Strain C0175A1 plasmid | Optional plasmid for C0175A1 |
| 7 | Strain C0028A1 genome | Strain C0028A1 |
| 8 | Strain C0028A1 plasmid | Optional plasmid for Strain C0028A1 |
| 9 | Strain FF00018 genome | Strain FF00018 |
| 10 | Strain FF00018 plasmid 1 | Optional plasmid for Strain FF00018 |
| 11 | Strain FF00018 plasmid 2 | Optional plasmid for Strain FF00018 |
| 12 | Strain FF00072 genome | Strain FF00072 |
| 13 | Strain FF00072 plasmid | Optional plasmid for Strain FF00072 |
| 14 | Strain 185329_1999_17 genome | Strain 185329_1999_17 |
| 15 | Strain 185329_1999_17 plasmid | Optional plasmid for Strain 185329_1999_17 |
| 16 | Strain UC119_2_11 genome | Strain UC119_2_11 |
| 17 | Strain UC119_2_11 plasmid | Strain UC119_2_11 |
| 18 | Strain C0059E1 genome | Strain C0059E1 |
| 19 | Strain FF00004 genome | Strain FF00004 |
| 20 | Strain C0112A1 genome | Strain C0112A1 |
| 21 | Strain C0022A1 genome | Strain C0022A1 |
| 22 | Strain FF00064 genome | Strain FF00064 |
| 23 | Strain FF00051 genome | Strain FF00051 |
| 24 | Strain UC101_2_33 genome | Strain UC101_2_33 |

[0053] The following table contains additional information pertaining to strains described herein. In some embodiments, strains comprise sequences having 95% (e.g., 96%, 97%, 98%, 99%, 99.5%, 99.6%, 99.7%, 99.8%, 99.9%, 99.95%, or 99.99%) sequence identity to any of the sequences described in Table 1. In some embodiments, strains comprise sequences having 99.5% sequence identity to any of the sequences described in Table 1. In some embodiments, strains comprise sequences having 99.9% sequence identity to any of the sequences described in Table 1. In some embodiments, strains comprise any of the sequences described in Table 1.

[0054] The recitations “sequence identity,” “percent identity,” or for example, “comprising a sequence 95% identical to,” as used herein, refer to the extent that sequences are identical on an amino acid-by-amino acid basis, or a nucleotide-by-nucleotide basis, or over a window of comparison. Thus, a “percentage of sequence identity” can be calculated by comparing two optimally aligned sequences (e.g., nucleic acid) over the window of comparison, determining the number of positions at which the identical nucleic acid base (e.g., A, T, C, G, U) or the identical amino acid residue (e.g., Ala, Pro, Ser, Thr, Gly, Val, Leu, Ile, Phe, Tyr, Trp, Lys, Arg, His, Asp, Glu, Asn, Gln, Cys and Met) occurs in both sequences to yield the number of matched positions, dividing the number of matched positions by the total number of positions in the window of comparison (i.e., the window size), and multiplying the result by 100 to yield the percentage of sequence identity.

[0055] Calculations of sequence similarity or sequence identity between sequences (the terms are used interchangeably herein) can be performed as follows. To determine the percent identity of two amino acid sequences, or of two nucleic acid sequences, the sequences can be aligned for optimal comparison purposes (e.g., gaps can be introduced in one or both of a first and a second amino acid or nucleic acid sequence for optimal alignment and non-homologous sequences can be disregarded for comparison purposes. The comparison of sequences and determination of percent identity between two sequences can be accomplished using a mathematical algorithm. In some embodiments, the percent identity between two amino acid sequences is determined using the Needleman and Wunsch, (1970, J. Mol. Biol. 48:444-453) algorithm which has been incorporated into the GAP program in the GCG software package, using either a BLOSUM 62 matrix or a PAM250 matrix, and a gap weight of 16, 14, 12, 10, 8, 6, or 4 and a length weight of 1, 2, 3, 4, 5, or 6. 0), using a PAM120 weight residue table, a gap length penalty of 12 and a gap penalty of 4.

[0056] In some embodiments, the LBP composition comprises two or more (e.g., three, four, five, six, seven, eight, nine, ten, eleven, twelve, thirteen, fourteen, or fifteen) Lactobacillus crispatus strains selected from the group of 122010_1999_16, C0022A1, C0175A1, C0059E1, C0028A1, C0006A1, FF00018, UC101_2_33, UC119_2_11, 185329_1999_17, C0112A1, FF00004, FF00064, FF00051, and FF00072.

[0057] In some embodiments, the LBP composition comprises Lactobacillus crispatus strains C0022A1, C0175A1, C0059E1, UC101_2_33, FF00051, and FF00018.

[0058] In some embodiments, the LBP composition comprises Lactobacillus crispatus strains 122010_1999_16, C0022A1, C0175A1, C0059E1, C0028A1, C0006A1, FF00018, UC101_2_33, UC119_2_11, 185329_1999_17, C0112A1, FF00004, FF00064, FF00051, and FF00072.

[0059] In some embodiments, the LBP composition comprises Lactobacillus crispatus strains C0022A1, C0175A1, C0112A1, FF00051, FF00018, and UC101_2_33. In some embodiments, the LBP composition comprises Lactobacillus crispatus strains C0022A1, C0175A1, and UC101_2_33.

[0060] In some embodiments, the LBP composition comprises Lactobacillus crispatus strains C0175A1, C0112A1, FF00051, FF00018, and FF00064.

[0061] In some embodiments, the LBP composition comprises Lactobacillus crispatus strains C0006A1, C0112A1, C0175A1, FF00018, and FF00064.

[0062] In some embodiments, the vaginal live bio-therapeutic composition comprises two bacterial strains having at least about 95% sequence identity (e.g., at least about 96%, 97%, 98%, 99%, 99.5%, 99.9% or 100% sequence identity) to a Lactobacillus crispatus strain selected from FF00051, C0022A1, C0175A1, C0059E1, FF00018, UC101_2_33.

[0063] In some embodiments, the LBP composition comprises two or more (e.g., three, four, five, six, seven, eight, nine, ten, eleven, twelve, thirteen, fourteen, or fifteen) bacterial strains having at least about 95% sequence identity (e.g., at least about 96%, 97%, 98%, 99%, 99.5%, 99.9% or 100% sequence identity) to a Lactobacillus crispatus strain selected from the group of 122010_1999_16, C0022A1, C0175A1, C0059E1, C0028A1, C0006A1, FF00018, UC101_2_33, UC119_2_11, 185329_1999_17, C0112A1, FF00004, FF00064, FF00051, and FF00072.

[0064] In some embodiments, the only active agents in the compositions comprise or consist of Lactobacillus crispatus strains or isolates as described herein. Such compositions can be prepared in a manner well known in the pharmaceutical art and include at least one active agent, i.e., a strain as described herein.

[0065] In some embodiments, the L. crispatus strains are originally isolated from a vaginal sample (e.g., a tissue sample, a vaginal secretion sample, etc.) obtained from a female individual (or individual with a vagina) having a stable Lactobacillus-dominated vaginal microbiome. In some embodiments, the vaginal live bio-therapeutic composition further comprises at least one Lactobacillus crispatus strain originally isolated from a vaginal sample obtained from a female individual (or individual with a vagina) having a stable Lactobacillus-dominated vaginal microbiome. In some embodiments, the vaginal live bio-therapeutic composition further comprises at least one additional Lactobacillus crispatus strain originally isolated from a vaginal sample obtained from a female individual (or individual with a vagina) having a stable Lactobacillus-dominated vaginal microbiome.

[0066] LBPs as described herein can be combined with pharmaceutical excipients known in the art to enhance preservation and maintenance of the isolates prior to administration to produce pharmaceutical compositions or pharmaceutical formulations. Any of the pharmaceutical composition, pharmaceutical formulations, or unit doses described herein can be administered to an individual in need thereof.

[0067] In some embodiments, LBP compositions for vaginal administration can be formulated as suppositories (e.g., to be administered as suppositories). Exemplary suppositories can be prepared by mixing the particles with suitable non-irritating excipients or carriers such as cocoa butter, polyethylene glycol, or a suppository wax, which are solid at ambient temperature but liquid at body temperature and therefore melt in the vaginal cavity and release the LBPs.

[0068] In some embodiments, the LBPs can be formulated as a cream for topical administration. For example, LBPs can be formulated as a vulvo-vestibular cream. LBPs can be administered in a suspension in liquid form for use in a douche, in a capsule or vaginal tablet, or, for example, in dried form in a capsule or vaginal tablet. LBPs can be dried on film, for example preservation by vaporization (PBV), for vaginal administration in which the isolates will re-hydrate/reactivate in the vaginal environment. The means by which the composition comprising the LBPs described herein should be administered as is appropriate for the given composition.

[0069] In some embodiments the composition will be administered in a suspension in a vaginal capsule, or, for example, in dried form in a capsule. Methods for maintaining viability of L. crispatus isolates throughout the drying process are known to those of skill in the art. LBPs, including but not limited to dried preparations, can also be formulated in forms such that when administered, the isolates avoid killing and are only released to re-hydrate/reactivate in the relatively safer environment of the vagina. LBPs useful in the methods and compositions described herein can also be prepared and/or administered in admixture with one or more prebiotic compositions that promote the maintenance, establishment and/or growth of the probiotic.

[0070] Therapeutic compositions containing the LBPs for the treatment of vaginal dysbiosis can be conventionally administered in a unit dose. The term “unit dose” when used in reference to a therapeutic composition refers to physically discrete units suitable as unitary dosage for the individual, each unit containing a predetermined quantity of active material calculated to produce the desired therapeutic effect in association with the required physiologically acceptable diluent, i.e., carrier, or vehicle. Optimal dosing occurs over a duration of about two weeks or less.

[0071] LBP dosage forms, whether tablets, capsules, caplets, or particulates, may, if desired, be formulated so as to provide for controlled release of the therapeutic compositions, where controlled release may be sustained release, delayed release, or a combination thereof. Controlled release formulations are preferably sustained release, meaning gradual delivery of the therapeutic compositions over an extended time period. Generally, as will be appreciated by those of ordinary skill in the art, sustained release dosage forms are formulated by dispersing the live bacterial strains and other active agents/ingredients within a matrix of a gradually hydrolyzable material such as a hydrophilic polymer, or by coating a solid, drug-containing dosage form with such a material. Hydrophilic polymers useful for providing a sustained release coating or matrix include, by way of example: cellulosic polymers such as hydroxypropyl cellulose, hydroxyethyl cellulose, hydroxypropyl methyl cellulose, methyl cellulose, ethyl cellulose, cellulose acetate, and carboxymethylcellulose sodium; acrylic acid polymers and copolymers, preferably formed from acrylic acid, methacrylic acid, acrylic acid alkyl esters, methacrylic acid alkyl esters, and the like, e.g. copolymers of acrylic acid, methacrylic acid, methyl acrylate, ethyl acrylate, methyl methacrylate and/or ethyl methacrylate; and vinyl polymers and copolymers such as polyvinyl pyrrolidone, polyvinyl acetate, and ethylene-vinyl acetate copolymer.

[0072] In some embodiments, compositions as described herein can be conveniently provided as liquid preparations for vaginal administration, e.g., isotonic aqueous solutions, suspensions, emulsions, dispersions, or viscous compositions, which may be buffered to a selected pH. Liquid preparations are normally easier to prepare than gels, other viscous compositions, and solid compositions. Additionally, liquid compositions are somewhat more convenient to administer, especially by injection. Viscous compositions, on the other hand, can be formulated within the appropriate viscosity range to provide longer contact periods with specific tissues. Liquid or viscous compositions can comprise carriers, which can be a solvent or dispersing medium containing, for example, water, saline, phosphate buffered saline, polyol (for example, glycerol, propylene glycol, liquid polyethylene glycol, and the like) and suitable mixtures thereof.

[0073] Compositions described herein can be prepared as solutions. For example, solutions can be prepared by incorporating the LBPs utilized in the methods and compositions as described herein in the required amount of the appropriate solvent with various amounts of the other ingredients, as desired. Such compositions may be in admixture with a suitable carrier, diluent, or excipient such as sterile water, physiological saline, glucose, dextrose, or the like. The compositions can also be lyophilized.

[0074] The compositions can contain auxiliary substances such as wetting, dispersing, or emulsifying agents (e.g., methylcellulose), pH buffering agents, gelling or viscosity enhancing additives, preservatives, flavoring agents, colors, and the like, depending upon the route of administration and the preparation desired. Standard texts, such as “REMINGTON'S PHARMACEUTICAL SCIENCE”, 17th edition, 1985, incorporated herein by reference, can be consulted to prepare suitable preparations, without undue experimentation.

[0075] In some embodiments, additional active agents are included in the compositions described and used herein. For example, a cysteine uptake inhibitor, an antibiotic treatment against BV, or a cysteine uptake inhibitor and an antibiotic treatment against BV. In some embodiments, a cysteine uptake inhibitor can prevent a bacterial cell (e.g., a cell of a bacterial species contributing to BV), from transporting cysteine into the cell from outside the cell. In some embodiments, a cysteine uptake inhibitor can selectively inhibit Lactobacillus iners growth in vitro or in vivo. Non-limiting cysteine uptake inhibitors can include S-methyl-L-cysteine (SMC) and seleno-DL-cysteine (SDLC). (See, for example, Bloom S M et al. Nat. Microbiol., (2022) March; 7 (3): 434-450, which is incorporated in its entirety.)

[0076] Various additives that enhance the stability and sterility of the compositions, including antimicrobial preservatives, antioxidants, chelating agents, and buffers, can be added. Prevention or reducing the risk of the action of microorganisms that contribute to vaginal dysbiosis or disorders associated with vaginal dysbiosis can be aided by various antibacterial and antifungal agents, for example, parabens, chlorobutanol, phenol, sorbic acid, and the like. In some embodiments, any of the additives that enhance the stability and sterility of the compositions do not inhibit the growth of L. crispatus, the survival of L. crispatus, or the growth of and the survival of L. crispatus.

[0077] The compositions can be isotonic, i.e., the compositions can have the same osmolarity and/or osmolality as blood and lacrimal fluid. The desired isotonicity of the compositions as described herein can be accomplished using sodium chloride, or other pharmaceutically acceptable agents such as dextrose, boric acid, sodium tartrate, propylene glycol or other inorganic or organic solutes. Sodium chloride is preferred particularly for buffers containing sodium ions.

[0078] Those skilled in the art will recognize that the components of the compositions should be selected to be chemically inert and will not affect the viability or efficacy of the isolates described in the present disclosure. This will present no problem to those skilled in chemical and pharmaceutical principles, or problems can be readily avoided by reference to standard texts or by simple experiments (not involving undue experimentation), from this disclosure and the documents cited herein.

[0079] The skilled artisan can readily determine the amount of isolates and optional additives, vehicles, and/or carrier in compositions and to be administered in methods as described herein. Of course, for any composition to be administered to a human, and for any particular method of administration, it is preferred to determine therefore: toxicity, the dosage of the composition(s), the concentration of components therein, and the timing of administering the composition(s), which elicit a suitable response. Such determinations do not require undue experimentation from the knowledge of the skilled artisan, this disclosure and the documents cited herein. And, the time for sequential administrations can be ascertained without undue experimentation.

[0080] Optional additives include, but are not limited to, acids (e.g., lactic acid), carbon sources for L. crispatus (e.g., maltose and/or glycogen), L. crispatus cell wall materials or precursors (e.g., glutamate or glutamine), a buffer (e.g., magnesium citrate), mucoadhesives, antimicrobial peptides or bacteriophage that kill or impair the growth of other bacterial species that can limit L. crispatus growth, for example, Gardnerella vaginalis, Atopobium vaginae, Prevotella bivia, Megasphaera spp., and combinations thereof.

[0081] Maltose is intended to serve as a carbon and energy source for L. crispatus. Maltose is a common breakdown product of host-produced glycogen in the vaginal epithelium that L. crispatus is known to be capable of metabolizing. Maltose is also more accessible to L. crispatus than glycogen, which requires degradation prior to import into the cell. Maltose gel can promote L. crispatus maintenance in the vaginal of Rhesus macaques, where it otherwise does not easily colonize.

[0082] Glutamine is intended to serve as a precursor to glutamate, a building block for the L. crispatus cell wall. L. crispatus has a characteristically thick cell wall, which requires significant metabolic input to construct. Glutamine is used as an amine donor in peptidoglycan biosynthesis and in the amidation of aspartate residues in peptide cross-links. Glutamine is also not predicted to be transported by many of the other common non-Lactobacillus species including: Gardnerella spp., Atopobium spp., and Ca. lachnocurva vaginae. Metatranscriptomic data also indicate that unstable L. crispatus populations (those that are supplanted by other bacteria) exhibit higher expression of glutamine synthase, which converts glutamate back to glutamine. Supplementing glutamine can therefore help stabilize these populations.

[0083] Lactic acid, both D and L isoforms, are produced by L. crispatus as fermentation end products. By doing so, these bacteria engineer a low vaginal pH, thereby preventing, reducing, or limiting the growth of less desirable species. L. crispatus, and many other Lactobacillus species, are acid tolerant and capable of growth at lower pH. By supplementing with lactic acid, L. crispatus consortia will have a growth advantage by accessing nutrients with enzymes that are optimally set to operate at low pH over the other bacteria which are inhibited at low pH. Preclinical safety trials have been conducted for a vaginal ring device that released lactic acid.

[0084] Magnesium citrate is intended to serve as a pH buffer. As L. crispatus grows, it produces lactic acid, which lower vaginal pH. While low vaginal pH is thought be healthy, a vaginal pH that is too low may also prevent, reduce, or limit the growth of even the acid-tolerant L. crispatus. Citrate and citrate salts (e.g., magnesium citrate) can have an optimal buffering capacity between 3.0 and 6.2 and can help stabilize vaginal pH at about 4.2, thereby promoting L. crispatus growth while inhibiting growth of other anaerobic bacteria.

### Methods of Treatment

[0085] Methods described herein can include methods for the treatment or reducing risk of vaginal dysbiosis or having a vaginal dysbiosis disorder in an individual in need thereof using any of the compositions described herein.

[0086] As used in this context, to “treat” means to reduce the risk of developing a vaginal dysbiosis disorder, to reduce the frequency of a vaginal dysbiosis disorder, or to ameliorate at least one symptom of the disorder associated with vaginal dysbiosis disorders or a disorder associated with a vaginal dysbiosis disorder (e.g., bacterial vaginosis (BV), cervical dysplasia, preterm birth, acquiring sexually transmitted infections (e.g., HIV), post-operative gynecological infections, or unsuccessful in vitro fertilization and/or spontaneous conception) in an individual in need thereof. For example, a treatment can result in a reduction of the severity, the frequency, or the number of symptoms or a reduction of the risk of having symptoms associates with vaginal dysbiosis disorders (e.g., BV), or a disorder associated with a vaginal dysbiosis disorder (e.g., cervical dysplasia, preterm birth, acquiring sexually transmitted infections, post-operative gynecological infections, or unsuccessful in vitro fertilization and spontaneous conception) in an individual in need thereof.

[0087] In some embodiments, the individual is a female or has a vagina. In some embodiments, the individual is an otherwise healthy individual. In some embodiments, the individual is pregnant. In some embodiments, the individual is an otherwise healthy pregnant individual. In some embodiments, the individual is an individual having had 3 or fewer BV infections in the past 12 months. In some embodiments, the individual is an individual having had 3 or more BV infections in the past twelve months (or two in a six month period). In some embodiments, the individual is an individual with recurring BV. In some embodiments, the individual is an individual with frequent bv infections. Administration of a therapeutically effective amount of any of the compositions described herein for the treatment of any of the conditions described herein associated with vaginal dysbiosis can result in a reduction in the amount or severity of vaginal discharge with foul smelling odor, a reduction in the amount of grayish or white vaginal discharge, a reduction in a burning sensation that can occur while urinating, or a reduction in itchiness around the vaginal area, inter alia.

[0088] BV is a vaginal dysbiosis disorder characterized by, for example, a depletion of Lactobacilli in the vaginal bacterial population, an increased diversity of the vaginal bacterial population, and an elevated vaginal pH (i.e. above about 4.5 pH). BV can also refer to an individual with a depletion of L. crispatus and relatively high abundance of L. iners. BV can be identified using a variety of mechanisms. For example, BV can be identified using either the Nugent scoring system or the Amsel criteria. The Nugent scoring system uses vaginal smears that are plated on a microscopic slide in oil immersion, and a minimum of 10 high power fields are examined for three bacteria morphotypes: Lactobacillus, Gardnerella, and curved gram rods. Each of these three categories receives a score based on the number of bacteria counted. Subsequently, these three scores are added together for a total score ranging from 0-10. A score of 0-3 is negative for BV, a score of 4-6 is intermediate for BV, and a score of 7+ is positive for BV.

[0089] Alternatively, the Amsel criteria can be used. There are four parameters used to determine the presence or absence of BV. These are 1) thin, white, yellow, homogeneous discharge, 2) clue cells on wet mount microscopy, 3) a vaginal fluid pH greater than 4.5 when placing the discharge on litmus paper, and 4) a release fishy odor after adding 10% potassium hydroxide (KOH) solution to wet mount (also known as “whiff test”). A clue cell is a type of vaginal epithelial cell to which a cluster of bacteria is attached. At least two of the four symptoms are present to receive a positive BV test result. Preferably, at least three of the four symptoms of the Amsel criteria are present.

[0090] BV can also be identified or diagnoses using molecular techniques, and can be called a molecular diagnosis. A molecular diagnosis of BV identifies or diagnoses BV-like states using bacterial sequencing methods to identify vaginal dysbiosis.

[0091] BV can also be identified using various clinical diagnostic options such as an enzyme based tests (e.g., OSOM® BVBlue), DNA probe tests (e.g., BD Affirm™ VPIII), or multi-target PCR tests (e.g., BD Max™, GeneXpert®, or Aptima® BV assay).

[0092] In some embodiments, a method of treating bacterial vaginosis comprises or further comprises an alleviation of one or more symptoms of BV. In some embodiments, a method of treating BV comprises or further comprises an alleviation of one or more symptoms of BV. In some embodiments, the one or more symptoms include, but are not limited to, abnormal vaginal odor, abnormal vaginal discharge or a combination thereof. In some embodiments, alleviation refers to a lessening of the severity of one or more symptoms.

[0093] In some embodiments, the individual is a female (or has a vagina) presenting with an off-white (e.g., milky or gray), thin, homogeneous vaginal discharge, vaginal pH greater than or equal to 4.7, presence of clue cells of greater than or equal to 20% of the total epithelial cells on microscopic examination of a vaginal saline wet mount, a positive 10% KOH whiff test or a combination thereof. In some embodiments, the individual is a female (or has a vagina) presenting with an off-white (milky or gray), thin, homogeneous vaginal discharge, vaginal pH greater than or equal to 4.7, the presence of clue cells of greater than or equal to 20% of the total epithelial cells on microscopic examination of a vaginal saline wet mount, and a positive 10% KOH whiff test. In some embodiments, the individual is a female (or has a vagina) with confirmed BV. In some embodiments, BV is confirmed by the presence of four (4) Amsel criteria parameters selected from an off-white (milky or gray), thin, homogeneous vaginal discharge, vaginal pH greater than or equal to 4.7, the presence of clue cells of greater than or equal to 20% of the total epithelial cells on microscopic examination of a vaginal saline wet mount, a positive 10% KOH Whiff test and a gram stain slide Nugent score equal to, or higher than four (4) on bacterial analysis of vaginal samples. In some embodiments, the individual is a female (or has a vagina) with suspected BV. In some embodiments, suspected BV is indicated by the presence of four (4) Amsel criteria parameters selected from an off-white (milky or gray), thin, homogeneous vaginal discharge, vaginal pH greater than or equal to 4.7, the presence of clue cells of greater than or equal to 20%, of the total epithelial cells on microscopic examination of a vaginal saline wet mount, and a positive 10% KOH Whiff test. In some embodiments, the individual is a female (or has a vagina) presenting with an off-white (milky or gray), thin, homogeneous vaginal discharge, odor, or a combination thereof.

[0094] Some embodiments are directed to methods for preventing or reducing the risk recurrence of a vaginal dysbiosis disorder (e.g., BV), or a disorder associated with a vaginal dysbiosis disorder (e.g., cervical dysplasia, preterm birth, acquiring sexually transmitted infections, post-operative gynecological infections, or unsuccessful in vitro fertilization and spontaneous conception). Such methods of preventing or reducing the risk recurrence of a vaginal dysbiosis disorder a vaginal dysbiosis disorder (e.g., BV), or a disorder associated with a vaginal dysbiosis disorder (e.g., cervical dysplasia, preterm birth, acquiring sexually transmitted infections, post-operative gynecological infections, or unsuccessful in vitro fertilization and spontaneous conception) can comprise administering to an individual in need thereof any of the compositions described herein.

[0095] Some embodiments are directed to methods for restoring Lactobacillus dominated microbiota in an individual in need thereof. Such methods of restoring Lactobacillus dominated microbiota can comprise administering to an individual in need thereof any of the compositions described herein. The individual can have low Lactobacillus prevalence or no Lactobacillus in their vaginal microbiota. In some embodiments, a method for restoring Lactobacillus dominated microbiota in an individual in need thereof comprises administering a vaginal live bio-therapeutic composition to the individual. In some embodiments, a method for restoring Lactobacillus dominated microbiota in an individual in need thereof comprises administering a vaginal live bio-therapeutic composition to the individual wherein the composition comprises any of the compositions described herein. For example, a method for restoring Lactobacillus dominated microbiota in an individual in need thereof can comprise administering a vaginal live bio-therapeutic composition to the individual wherein the composition comprises two or more Lactobacillus crispatus strains selected from FF00051, C0022A1, C0175A1, C0059E1, FF00018, UC101_2_33, and combinations thereof, thereby restoring Lactobacillus dominated microbiota in the individual (see Table 1 for additional strain information).

[0096] In some embodiments, a method for restoring Lactobacillus dominated microbiota in an individual in need thereof comprises administering a vaginal live bio-therapeutic composition to the individual wherein the composition comprises any of the compositions described herein. For example, a method for restoring Lactobacillus dominated microbiota in an individual in need thereof comprises administering a vaginal live bio-therapeutic composition to the individual wherein the composition comprises two or more Lactobacillus crispatus strains selected from FF00051, C0022A1, C0175A1, C0059E1, FF00018, UC101_2_33, and combinations thereof, and optionally one or more additional Lactobacillus crispatus strains, thereby restoring Lactobacillus dominated microbiota in the individual. In some embodiments, a method for restoring Lactobacillus dominated microbiota in an individual in need thereof comprises administeringa vaginal live bio-therapeutic composition to the individual wherein the composition comprises two or more Lactobacillus crispatus strains selected from FF00051, C0022A1, C0175A1, C0059E1, FF00018, UC101_2_33, and combinations thereof, and at least one additional (e.g., one additional, two additional, three additional, four additional, five additional, six additional, seven additional, eight additional, nine additional, ten additional, eleven additional, twelve additional, thirteen additional, fourteen additional, or fifteen additional) Lactobacillus crispatus strain, thereby restoring Lactobacillus dominated microbiota in the individual. In some embodiments, a method for restoring Lactobacillus dominated microbiota in an individual in need thereof comprises administering a vaginal live bio-therapeutic composition to the individual wherein the composition comprises two or more Lactobacillus crispatus strains selected from FF00051, C0022A1, C0175A1, C0059E1, FF00018, UC101_2_33, and combinations thereof, and at least one an additional Lactobacillus crispatus strain selected from C0028A1, C0006A1, C0112A1, FF00004, UC119_2_11, FF00064, 122010_1999_16, 185329_1999_17, and FF00072, and combinations thereof, thereby restoring Lactobacillus dominated microbiota in the individual.

[0097] The present invention is additionally described by way of the following illustrative, non-limiting Examples that provide a better understanding of the present invention and of its many advantages.

### EXAMPLES

[0098] The following Examples illustrate some embodiments and aspects of the inventions described herein. It will be apparent to those skilled in the relevant art that various modifications, additions, substitutions, and the like can be performed without altering the spirit or scope of the inventions, and such modifications and variations are encompassed within the scope of the inventions as defined in the claims which follow. The following Examples do not in any way limit the inventions.

[0099] The Materials and Methods used in the following Examples are described in detail herein below.

### Example 1. Microbiome-Based Informed Method to Formulate Live Biotherapeutic Products

[0100] In a first phase, a collection of L. crispatus isolates were cultivated from vaginal swabs collected from South African and US women with stable L. crispatus-dominated vaginal microbiota. The genomes of these L. crispatus isolates were sequenced and the genes encoded in each of the genomes were combined into a custom database. In parallel, the metagenomes of several samples (3 to 5) from US and South African women were sequenced. These metagenomic sequence reads were then mapped to the VIRGO, a comprehensive catalogue of genes from the vaginal microbiome³⁶ affording the identification of all the genes and their taxonomic origin (the bacteria they belong to) in these metagenomes. For each metagenomic dataset, all genes assigned to L. crispatus were databased. As previously reported³⁶ the number of genes belonging to L. crispatus in a metagenome is higher than that encoded on one genome of L. crispatus, indicating that more than one strain of L. crispatus co-exist in a vaginal microbiome dominated by L. crispatus.

[0101] A total of 73 and 121 L. crispatus isolates were obtained from 6 US and 9 South African women with stable L. crispatus-dominated vaginal microbiome. In addition, a total of 44 and 23 metagenomes were obtained from 10 each US and South African women with stable L. crispatus-dominated vaginal microbiome. After dereplication of the L. crispatus genomes, a total of 15 isolate genomes remained to be included in the analysis.

[0102] The aim was to assemble a consortia of L. crispatus isolates which combined genes represent a maximum number of L. crispatus genes from each metagenome. To determine the optimal consortia of L. crispatus strains, a heuristic algorithm was utilized that matches genes encoded on isolate genomes to metagenomic data and determine the minimum number of L. crispatus strains while maximizing the number of L. crispatus genes encoded in the metagenomes from a maximum number of women. Gene accumulation curves were built for all combinations possible, that is, each time an additional strain was added to a consortium, the number of new genes matching the metagenome data were added to the total, and percentage of gene represented was plotted. The analysis showed that the number of genes added plateaued and was minimal after 6 strains and an average 75% of L. crispatus metagenome-encoded genes represented by the consortia. Essentially, the six selected strains represented the point at which the number of genes added by a 7th isolate was very low. The algorithm generated 335 combinations of 5 or 6 strains, representing 93 unique consortia of 5 or 6 strains. The consortia were then ranked based on the number of women they represented. Total of 5 consortia represented metagenomes from at least 4 women:
[0103] 1. LC-106 (VMRC-1): A six-strain consortium comprising of L. crispatus strains C0022A1, C0175A1, C0059E1, FF00018, FF00051 and UC101_2_33 matched metagenomes from 7 women,
[0104] 2. VMRC-2: A six-strain consortium comprising of L. crispatus strains C0022A1, C0175A1, C0112A1, FF00051, FF00018 and UC101_2_33 matched metagenomes from 4 women,
[0105] 3. VMRC-3: A five-strain consortium comprising of L. crispatus strains C0022A1, C0175A1, C0059A1, UC119_2_14 and UC101_2_33 matched metagenomes from 6 women,
[0106] 4. VMRC-4: A five-strain consortia comprising of L. crispatus strains C0175A1, C0112A1, FF00051, FF00018 and FF00064 matched metagenomes from 6 women,
[0107] 5. VMRC-5: A five-strain consortia comprising of L. crispatus strains C0006A1, C0112A1, C0175A1, FF00018, and FF00064, matched metagenomes from 6 women.

[0108] Each of the consortia was further evaluated for 1) the potential inhibition of any of the strains comprised in these consortia by another one and; 2) for each consortia antimicrobial properties against a set of 12 non-desirable microbial species often found in the vagina of women with conditions such as BV. These included of total of 58 isolates from multiple strains (in parenthesis) of Gardnerella spp. (16), Prevotella bivia (8), Prevotella disiens (2), Prevotella timonensis (7), Atopobium vaginae (6), Streptococcus angiosus (6), Streptococcus agalactiae (2), Lactobacillus iners (4), Escherichia coli (2), Candida albicans (5), Mobiluncus mulieris (1) and Mobiluncus curtisii (1). Fourteen of these isolates were cultured from South African women.

[0109] None of the L. crispatus strains were shown to inhibit the growth of the other in cross-streaking assays on MRS agar plates. The antimicrobial assays were performed using a 2-streak assay, where the L. crispatus strains were streaked twice (¼ inch apart) across a 15×15 cm agar plates and incubated for 8 hours. Following incubation, a 20 μl suspension of the target strain was spotted in between the two L. crispatus streaks. A control 20 μl suspension of the same target strain was spotted on a separate plate and at the bottom of the 15×15 cm agar plate. The growth of the target strain was evaluated semi-quantitively and recorded using a 1-4 score system (1, indicating growth was similar to controls, i.e., no antimicrobial activity; and 4 indicating no growth and growth of the controls). The scored were tallied and a 1 to 5 weighing factor was applied to each target strains according to their importance to vaginal diseases. A score for the consortia was then calculated according to the following formula: Σ score*weight/Σ weights. Using this ranking system, LC-106 had the strongest antimicrobial properties.

[0110] The assay was performed for all 15 L. crispatus strains individually, and for each of the 5 consortia, and a consortium comprising all 15 strains. Consortia had higher antimicrobial properties than any individual strain (See FIGS. 4A-4H). Lastly, the genomes of all 15 strains were examined using the Comprehensive Antibiotic Resistance Database (CARD). 37 No antibiotic resistance genes were found on the genomes of these 15 L. crispatus strains. This was further confirmed by disc-assay (Etest) on MRS agar for azithromycin, doxycycline, clindamycin and amoxicillin, which showed no resistance. Because the genetic determinants for metronidazole resistance are unknown, metronidazole is a recommended treatment for several vaginal infection, and L. crispatus was expected to not be affected by metronidazole, we used a disc-assay to test for metronidazole and hydroxy-metronidazole resistance. The assay showed that the growth of all L. crispatus strains was unaffected by either metronidazole or hydroxy-metronidazole, while that of a metronidazole-sensitive G. vaginalis isolate was inhibited, and that of two metronidazole-resistant G. vaginalis isolates was not.

### Example 2. Lactobacillus crispatus Strains are not Inflammatory in Endocervical Cell Lines

[0111] Two assays were done to assess whether Lactobacillus crispatus strains comprising LBPs as described herein are inflammatory in Endocervical tissue. Either conditioned media in which the Lactobacillus crispatus strains were grown and applied to an endocervical cell line (End1) or heat killed Lactobacillus crispatus strains were cultured with End1 cells and secretion of inflammatory marker IL-8 was used as a readout of induced inflammation by End1 cells.

[0112] For the conditioned media assay, strains were grown in MRS broth overnight, and then seeded in new broth and grown for 5 hours to reach the exponential phase prior to collecting media.

[0113] For the heat-killed assay, broth culture was heated to 80° C. for 15 minutes, pelleted, resuspend and co-cultured for 20 hours with End1 cells in a 96-well plate, anaerobically.

[0114] Using 2%, 1%, or 0.05% conditioned media, similar and low levels of IL-8 was observed between all strains (FIGS. 1A-1B, and FIG. 2).

[0115] Culture of End1 cells with heat killed strains resulted in a dose response (i.e., OD1 shows more IL-8 than OD 0.1 and OD 0.01), with overall IL-8 levels remaining low (FIGS. 3A-3B). An OD of 10 corresponded to a MOI of 500-2000. An OD of 0.1 corresponded to a MOI of 50-200. An OD of 0.01 corresponded to a MOI of 5 to 20.

### Example 3. Phase 1 Trial of Multi-Strains L. crispatus Vaginal Live Biotherapeutic Products (LBP) is Proposed

[0116] A Phase I randomized trial of a novel live biotherapeutic intervention containing multiple strains of L. crispatus will compare safety and biologic effects of two different consortia of L. crispatus strains, and a variety of dosing strategies in women with BV who receive antibiotic treatment.

[0117] The primary objective of this study is 1) to determine colonization kinetics of a vaginally-delivered live biotherapeutic product, 2) to determine the capacity of the individual L. crispatus strains from the LBP to establish colonization in two geographically distinct populations and 3) inform the optimal dosing frequency and duration. As this intervention has not previously been tested in humans, and as there is no adequate animal model, a first human trial will be performed.

[0118] The study population comprises 50 pre-menopausal, non-pregnant individuals aged 18-40 years with BV diagnosed by Nugent score at two clinical sites: Boston, Massachusetts and KwaZulu Natal, South Africa. The treatment regimen will comprise the LC-106 LBP composition consisting of L. crispatus strains C0022A1, C0175A1, C0059E1, FF00051, FF00018 and UC101_2_33, the LC-115 LBP composition comprising or consisting of L. crispatus strains C0022A1, C0112A1, C0175A1, C0059E1, C0028A1, C0006A1, UC101_2_33, UC119_2_11, FF00004, FF00018, FF00064, FF00051, FF00072, 185329_1999_17 and 122010_1999_16, or any of the compositions described herein, concurrent with or following metronidazole treatment.
[0119] 1. Placebo daily for 7d after metronidazole treatment
[0120] 2. LC-106 daily for 7d after metronidazole treatment
[0121] 3. LC-106 daily for 3d+4 days of placebo, starting after metronidazole treatment
[0122] 4. LC-106 daily for 7d, starting on day 3 of metronidazole treatment
[0123] 5. LC-115 daily for 7d after metronidazole treatment

[0124] Four study arms will have similar packaging, and participants and study staff will be blinded to their allocation: the 7-day placebo, and the 7 days of active LBP for LC-106 and LC-115 used after completion of antibiotics. In addition, for the individuals randomized to three days of active LBP, the LBP will be packaged with 4 days of placebo for a total of 7 days of study product. Those who are randomized to start LBP on day 3 of antibiotics will not be blinded.

[0125] Primary outcomes to be determined include safety, as measured by adverse event (AE) and serious adverse event (SA) reporting, and colonization with any L. crispatus strain contained in the live biotherapeutic product at 5 weeks after initiation of antibiotic therapy. Colonization will be defined as detection of any one of the L. crispatus strains contained in the LBP at >5% relative abundance on shotgun sequencing of the vaginal microbial community and a total of 10% of all L. crispatus strains.

[0126] Secondary outcomes to be determined include kinetics of colonization with any of the strains contained in the LBP throughout the study using strain-specific qPCR, BV by Nugent score (a gram stain scoring system for vaginal swabs to diagnose BV), non-iners Lactobacillus dominance of the vaginal microbiota, defined by >50% of sequences by 16S rRNA gene sequencing, relative abundance of non-iners Lactobacillus species and L. iners over time, change in diversity and composition of the vaginal microbial community over time, participant acceptability and tolerability of product and comparison of effects between US and South African sites.

[0127] Exploratory outcomes include, but are not limited to, change in vaginal fluid inflammatory markers, predictors of colonization, impact of baseline and post-antibiotic microbiota on response to intervention.

### REFERENCES

[0128] All patents, patent applications and publications mentioned in this specification are herein incorporated by reference to the same extent as if each independent patent and publication was specifically and individually indicated to be incorporated by reference.
[0129] 1. Gosmann C, Anahtar M N, Handley S A, et al. Lactobacillus-Deficient Cervicovaginal Bacterial Communities Are Associated with Increased HIV Acquisition in Young South African Women. Immunity. Jan. 17, 2017; 46 (1): 29-37. doi: 10.1016/j.immuni.2016.12.013
[0130] 2. Brotman R M, Shardell M D, Gajer P, et al. Interplay between the temporal dynamics of the vaginal microbiota and human papillomavirus detection. The Journal of Infectious Diseases. Dec. 1, 2014; 210 (11): 1723-33. doi: 10.1093/infdis/jiu330
[0131] 3. Watts D H, Fazzari M, Minkoff H, et al. Effects of bacterial vaginosis and other genital infections on the natural history of human papillomavirus infection in HIV-1-infected and high-risk HIV-1-uninfected women. The Journal of Infectious Diseases. Apr. 1, 2005; 191 (7): 1129-39.
[0132] 4. Hillier S L, Nugent R P, Eschenbach D A, et al. Association between bacterial vaginosis and preterm delivery of a low-birth-weight infant. The Vaginal Infections and Prematurity Study Group. The New England Journal of Medicine. Dec. 28, 1995; 333 (26): 1737-42.
[0133] 5. Macones G A, Parry S, Elkousy M, Clothier B, Ural S H, Strauss J F, 3rd. A polymorphism in the promoter region of TNF and bacterial vaginosis: preliminary evidence of gene-environment interaction in the etiology of spontaneous preterm birth. American Journal of Obstetrics and Gynecology. June 2004; 190 (6): 1504-8; discussion 3A.
[0134] 6. Gajer P, Brotman R M, Bai G, et al. Temporal dynamics of the human vaginal microbiota. Sci Transl Med. May 2, 2012; 4 (132): 132ra52. 7. Srinivasan S, Liu C, Mitchell C M, et al. Temporal variability of human vaginal bacteria and relationship with bacterial vaginosis. PLOS One. 2010; 5 (4): e10197. doi: 10.1371/journal.pone.0010197
[0135] 8. Herbst-Kralovetz M M, Pyles R B, Ratner A J, Sycuro L K, Mitchell C. New Systems for Studying Intercellular Interactions in Bacterial Vaginosis. The Journal of Infectious Diseases. Aug. 15, 2016; 214 Suppl 1: S6-S13. doi: 10.1093/infdis/jiw130
[0136] 9. Peebles K, Velloza J, Balkus J E, McClelland R S, Barnabas R V. High Global Burden and Costs of Bacterial Vaginosis: A Systematic Review and Meta-Analysis. Sexually Transmitted Diseases. May 2019; 46 (5): 304-311. doi: 10.1097/OLQ.0000000000000972
[0137] 10. Fredricks D N, Fiedler T L, Thomas K K, Mitchell C M, Marrazzo J M. Changes in Vaginal Bacterial Concentrations with Intravaginal Metronidazole Therapy for Bacterial Vaginosis as Assessed by Quantitative PCR. Journal of Clinical Microbiology. 47 (3), 721-726.
[0138] 11. Mitchell C, Balkus J, Agnew K, Lawler R, Hitti J. Changes in the vaginal microenvironment with metronidazole treatment for bacterial vaginosis in early pregnancy. Journal of Women's Health. November 2009; 18 (11): 1817-24. doi: 10.1089/jwh.2009.1378
[0139] 12. Muzny C A, Kardas P. A Narrative Review of Current Challenges in the Diagnosis and Management of Bacterial Vaginosis. Sexually Transmitted Diseases. 2020 July: 47 (7): 441, doi: 10.1097/OLQ.0000000000001178
[0140] 13. Petrova M I, Reid G, Vaneechoutte M, Lebeer S. Lactobacillus iners: Friend or Foe? Trends Microbiol. March 2017; 25 (3): 182-191. doi: 10.1016/j.tim.2016.11.007
[0141] 14. Ravel J, Gajer P, Abdo Z, et al. Vaginal microbiome of reproductive-age women. Proc Natl Acad Sci USA. Mar. 15, 2010; 108 Supplment 1:4680-7. doi: 1002611107
[0142] 15. Lambert J A, John S, Sobel J D, Akins R A. Longitudinal analysis of vaginal microbiome dynamics in women with recurrent bacterial vaginosis: recognition of the conversion process. PLOS One. 2013; 8 (12): e82599. doi: 10.1371/journal.pone.0082599
[0143] 16. Mayer B T, Srinivasan S, Fiedler T L, Marrazzo J M, Fredricks D N, Schiffer J T. Rapid and Profound Shifts in the Vaginal Microbiota Following Antibiotic Treatment for Bacterial Vaginosis. The Journal of Infectious Diseases. Sep. 1, 2015; 212 (5): 793-802. doi: 10.1093/infdis/jiv079
[0144] 17. Ravel J, Brotman R M, Gajer P, et al. Daily temporal dynamics of vaginal microbiota before, during and after episodes of bacterial vaginosis. Microbiome. 2013; 1 (1): 29. doi: 10.1186/2049-2618 Jan. 29
[0145] 18. van de Wijgert J, Verwijs M C. Lactobacilli-containing vaginal probiotics to cure or prevent bacterial or fungal vaginal dysbiosis: a systematic review and recommendations for future trial designs. BJOG. January 2020; 127 (2): 287-299. doi: 10.1111/1471-0528.15870
[0146] 19. Verwijs M C, Agaba S K, Darby A C, van de Wijgert J. Impact of oral metronidazole treatment on the vaginal microbiota and correlates of treatment failure. American Journal of Obstetrics and Gynecology. Aug. 9, 2019; doi: 10.1016/j.ajog.2019.08.008
[0147] 20. Hemmerling A, Harrison W, Schroeder A, et al. Phase 2a study assessing colonization efficiency, safety, and acceptability of Lactobacillus crispatus CTV-05 in women with bacterial vaginosis. Sexually Transmitted Diseases. December 2010; 37 (12): 745-50. doi: 10.1097/OLQ.0b013e3181e50026
[0148] 21. Ngugi B M, Hemmerling A, Bukusi E A, et al. Effects of bacterial vaginosis-associated bacteria and sexual intercourse on vaginal colonization with the probiotic Lactobacillus crispatus CTV-05. Sexually Transmitted Diseases. November 2011; 38 (11): 1020-7. doi: 10.1097/OLQ.0b013e3182267ac4
[0149] 22. Cohen C R, Wierzbicki M R, French A L, et al. Randomized Trial of Lactin-V to Prevent Recurrence of Bacterial Vaginosis. The New England Journal of Medicine. May 14, 2020; 382 (20): 1906-1915. doi: 10.1056/NEJMoa1915254
[0150] 23. Bilardi J E, Walker S, Temple-Smith M, et al. The burden of bacterial vaginosis: women's experience of the physical, emotional, sexual and social impact of living with recurrent bacterial vaginosis. PLOS One. 2013; 8 (9): e74378. doi: 10.1371/journal.pone.0074378
[0151] 24. DiGiulio D B, Romero R, Amogan H P, et al. Microbial prevalence, diversity and abundance in amniotic fluid during preterm labor: a molecular and culture-based investigation. PLOS One. 2008; 3 (8): e3056. doi: 10.1371/journal.pone.0003056
[0152] 25. Hay P E, Lamont R F, Taylor-Robinson D, Morgan D J, Ison C, Pearson J. Abnormal bacterial colonisation of the genital tract and subsequent preterm delivery and late miscarriage. BMJ (Clinical research ed). Jan. 29, 1994; 308 (6924): 295-8.
[0153] 26. Watts D H, Krohn M A, Hillier S L, Eschenbach D A. Bacterial vaginosis as a risk factor for post-cesarean endometritis. Obstetrics and Gynecology. January 1990; 75 (1): 52-8.
[0154] 27. Moore D E, Soules M R, Klein N A, Fujimoto V Y, Agnew K J, Eschenbach D A. Bacteria in the transfer catheter tip influence the live-birth rate after in vitro fertilization. Fertility and Sterility. December 2000; 74 (6): 1118-24.
[0155] 28. Boeke A J, Dekker J H, van Eijk J T, Kostense P J, Bezemer P D. Effect of lactic acid suppositories compared with oral metronidazole and placebo in bacterial vaginosis: a randomised clinical trial. Genitourinary Medicine. October 1993; 69 (5): 388-92.
[0156] 29. Bradshaw C S, Morton A N, Hocking J, et al. High recurrence rates of bacterial vaginosis over the course of 12 months after oral metronidazole therapy and factors associated with recurrence. The Journal of Infectious Diseases. Jun. 1, 2006; 193 (11): 1478-86.
[0157] 30. Bradshaw C S, Pirotta M, De Guingand D, et al. Efficacy of oral metronidazole with vaginal clindamycin or vaginal probiotic for bacterial vaginosis: randomised placebo-controlled double-blind trial. PLOS One. 2012; 7 (4): e34540. doi: 10.1371/journal.pone.0034540
[0158] 31. Bohbot J M, Vicaut E, Fagnen D, Brauman M. Treatment of bacterial vaginosis: a multicenter, double-blind, double-dummy, randomised phase III study comparing secnidazole and metronidazole. Infectious Diseases in Obstetrics and Gynecology. 2010 doi: 10.1155/2010/705692
[0159] 32. Brandt M, Abels C, May T, Lohmann K, Schmidts-Winkler I, Hoyme U B. Intravaginally applied metronidazole is as effective as orally applied in the treatment of bacterial vaginosis, but exhibits significantly less side effects. European Journal of Obstetrics, Gynecology, and Reproductive Biology. December 2008; 141 (2): 158-62. doi: 10.1016/j.ejogrb.2008.07.022
[0160] 33. Schwebke J R, Lensing S Y, Lee J, et al. Treatment of Male Sexual Partners of Women with Bacterial Vaginosis (BV); A Randomized, Double-Blind, Placebo-Controlled Trial. Clin Infect Dis. Dec. 31, 2020; doi: 10.1093/cid/ciaa1903
[0161] 34. Turner A N, Carr Reese P, Fields K S, et al. A blinded, randomized controlled trial of high-dose vitamin D supplementation to reduce recurrence of bacterial vaginosis. American Journal of Obstetrics and Gynecology. November 2014; 211 (5): 479 e1-479 e13. doi: 10.1016/j.ajog.2014.06.023
[0162] 35. Ratten L K, Plummer E L, Murray G L, et al. Sex is associated with the persistence of non-optimal vaginal microbiota following treatment for bacterial vaginosis: a prospective cohort study. BJOG. March 2021; 128 (4): 756-767. doi: 10.1111/1471-0528.16430
[0163] 36. Ma, B. et al. A comprehensive non-redundant gene catalog reveals extensive within-community intraspecies diversity in the human vagina. Nature Communications 11, 940-13 (2020).
[0164] 37. Alcock et al. 2020. CARD 2020: Antibiotic Resistome Surveillance with the Comprehensive Antibiotic Resistance Database. Nucleic Acids Research, 48, D517-D525.

### Other Embodiments

[0165] It is to be understood that while the invention has been described in conjunction with the detailed description thereof, the foregoing description is intended to illustrate and not limit the scope of the invention, which is defined by the scope of the appended claims. Other aspects, advantages, and modifications are within the scope of the following claims.

What is claimed is:

1. A method for treating or reducing the risk of vaginal dysbiosis in an individual in need thereof, said method comprising administering a vaginal live bio-therapeutic composition to the individual, wherein the composition comprises two or more Lactobacillus crispatus strains selected from FF00051, C0022A1, C0175A1, C0059E1, FF00018, UC101_2_33 and combinations thereof, thereby treating vaginal dysbiosis in the individual.

2. The method of claim 1, wherein the vaginal live bio-therapeutic composition further comprises at least one additional Lactobacillus crispatus strain originally isolated from a vaginal tissue sample obtained from a female individual or individual with a vagina having a stable Lactobacillus-dominated vaginal microbiome.

3. The method of claim 2, wherein the at least one additional Lactobacillus crispatus strain is selected from C0028A1, C0006A1, C0112A1, FF00004, UC119_2_11, FF00064, 122010_1999_16, 185329_1999_17 and FF00072 and combinations thereof.

4. The method of claim 1, where in the vaginal dysbiosis is bacterial vaginosis.

5. A vaginal live bio-therapeutic composition comprising two or more Lactobacillus crispatus strains selected from FF00051, C0022A1, C0175A1, C0059E1, FF00018, UC101_2_33 and combinations thereof.

6. The vaginal live bio-therapeutic composition of claim 5, wherein the composition further comprises at least one additional Lactobacillus crispatus strain originally isolated from a vaginal tissue sample obtained from a female individual or individual with a vagina having a stable Lactobacillus-dominated vaginal microbiome.

7. The vaginal live bio-therapeutic composition of claim 6, wherein the at least one additional Lactobacillus crispatus strain is selected from C0028A1, C0006A1, C0112A1, FF00004, UC119_2_11, FF00064, 122010_1999_16, 185329_1999_17, and FF00072 and combinations thereof.

8. The vaginal live bio-therapeutic composition of claim 6, wherein the composition further comprises at least one of lactic acid, maltose, glycogen, glutamine and magnesium citrate or combinations thereof.

9. The vaginal live bio-therapeutic composition of claim 6, wherein the composition further comprises at least one mucoadhesive.

10. The vaginal live bio-therapeutic composition of claim 6, wherein the composition further comprises at least one antimicrobial peptide.

11. The vaginal live bio-therapeutic composition of claim 6, wherein the composition further comprises at least one cysteine uptake inhibitor.

12. A method for restoring Lactobacillus dominated microbiota in an individual in need thereof, said method comprising administering a vaginal live bio-therapeutic composition to the individual, wherein the composition comprises two or more Lactobacillus crispatus strains selected from FF00051, C0022A1, C0175A1, C0059E1, FF00018, UC101_2_33 and combinations thereof, thereby restoring Lactobacillus dominated microbiota in the individual.

13. The method of claim 12, wherein the vaginal live bio-therapeutic composition further comprises at least one additional Lactobacillus crispatus strain originally isolated from a vaginal tissue sample obtained from a female individual or individual with a vagina having a stable Lactobacillus-dominated vaginal microbiome.

14. The method of claim 13, wherein the at least one additional Lactobacillus crispatus strain is selected from C0028A1, C0006A1, C0112A1, FF00004, UC119_2_11, FF00064, 122010_1999_16, 185329_1999_17 and FF00072 and combinations thereof.

The application's sequence listing, which the Patent Office published only in electronic form, follows.

SEQUENCE LISTING (24 sequences)

SEQ ID NO: 1 - DNA, 2514566 bp, Lactobacillus crispatus
  source 1..2514566: mol_type = genomic DNA
ttgttcgacattaataaattttgggaacactttaatgacgagatgcgtgctcgtttcaacgaagttgcctacaatgcatggttcaaaaatactaaacctatttcatataatggaaaaacacatgaattaaaaattttagttcaaaatcctgtttctaaaggttactgggaaaagaatctatcttctcaattgattcaatctgcctacggttatgccgacatcgagatcttacctgtatttaaaatatctgaagatgcggatattacagaaaggatcgtaacacctgcgccaaagcgtgatgcgcaagttcaacagcctaatttgccagaaaaagaattcactaaagacttgaagttaaacgaaaaatacacttttgataacttcgttcaaggtgagggaaacaagttggccgccggtgctgcacttgctgtagccgacagtcctggtagtttttacaatcctttatttatttttggtggcgttggtttaggtaaaacacacctgatgcaagctgttgggcatcaaatgctagcagagcgacctaacgcaaaagttgtctatatacagagtgaaacttttgttaatgacttcattaattccatcaaaaataaaacgcaggacaaattccgcgaaaaatacagaacttgtgacctgcttttagttgatgatattcaattttttgccaaaaaagaggggattcaagaggaattcttccatacttttgagacactttataacgatcaaaaacagatcgtaatgactagcgatcggttgcctacagaaatcccagatctatcagagcgtttagtttctcgatttacatggggcttgcaagtcgaaattacgcctcccgatttggaaaccagaatcgctattttgcgacgcaaagctgaaacagaaggtttgactatcgatgatggtacgcttaactatattgcatctcaagttgatactaacattagagaacttgaaggggctttagttaaagttcaagcttatgccacaattgaaaaagcagatattgacgttaaccttgcgcgtgaagcattagttgacctcaaattagttcaaaaaaatcgtggattacaaatctctaaaatacaggaggttgtcgcaaactatttccaaacttcaactgctgaattaaagggtaaaaagcgtgtacggcagattgtagttcctcggcaaatagcaatgtatctttctcgtgaattaacagatgccagtttgccaaaaattggtcaagaatttgggggaaaagatcataccactgtcatgcatgcttatgataaaatcgacaagcagatgaaacttgattctgatatcaaaactgctgtctttgacctaaagcaaattttggagcactaaaagttatccactgtggaaaaataaacaagttttacacaagtttttaaccgtaacaagtccgttattttaggcttcttatgagttttcaacagaactcacaggccctattactactaattaattatataattactaataaagagaaatcacacagctattcttgggaggaaaaacatgaagtttacaattaatcgcaatctgtttatcgaaaacctcaataatgtaatgcgggccatctcatcaagagctactattccaattcttagtggaattaagttagacttaacagaagataaacttacgttaacgggtagtgatacagatatttcaattgaaattcaaattccagtcaatgatgatttaaatgtggaatctacaggttctattgttttaccagctagattctttagtgaaatcgtaaaaaaattacctggtaaagacttctcatttgaagtaaaagaaagttttcaaactcagatcatatctgaaaatagtgaatttacaattaatggtttagatgctaataactatccacgtttaccagaaattccagatgctgcttcattcactatttctggtaaaactttccgtgaaatcattaatgaaacgcaatttgctacttccaatgatcaaacacgagcaattttaactggggtacgtttcttctttagtccagataaaattaaagctgtcgcaactgattcccaccgtttatctcaaagaacaattgctttagaaaacggacctcaagctgaaactgatttgattattcctggtaaaagtttgcaggaattagctagaatcattggtgaagctgatccagaagttaaagtttgcccaggtgataaccaagctttatttgtaattggcaacttgtccttctattcacgtcttttggacggaaattatccagacactgatcgcttgattccgactgaaaagaccactagtgttgaatttgacatttccgaattatctagtgcccttgaacgtgccagtttgttaactcatgctggccgtaacaacgtggttactttgactttggatatagaaaatcaatcagctaagttatcaggtaaatctgcggaaattggtaatgttgaagaagatgttagcttcagaaatcttgaaggaaacaatttagagatttccttcaaccctgactatatgcgtgatgcgttaagagcttcagtaacagattctgtaattatgagttttactaagccacttcgtccatttatcattaatccagataaagaagacattgaatttgtgcaattaattacgccagttagaacatattaatcaagtacacaatatttgggtcataaaaagtcgtcaaataaggcgactttttattttgcttttaaacgaaaacgcaaaatattggcgtatatttatttttttaccgtgctagtgtgattaggttattttgaaaaaaagctctgaaaaggcttataagagcgatttagtttgttatttgtgttgaaaactaatataattatataggtataaagcgtattgaaggtgagcattattaagtattttaaagttgacggcgatcatattactttggggcaatttctgaaggaagagagcattatttcatcaggtggacaagctaaatggtacttaaaagataatccagtaactttaaatggtgaacttgaagatcgaagaggcaaaaagatgcatgttggtgatcacgtagtggttaatggccaagaatatgagtttcggtagggaagtcaatgtatcttgatcattttactgtacagaattttcgtaatttaaaaaagcttgacgtaaattttgattcaaacgtcaatatttttattggcaaaaatgctcagggcaagaccaatttgctagaggcaatctattttttagcattaacacgttcacataggaccaataatgataaagatttaattggtttcggcggtgagtttaccaatttacttgggcatgtacataaaagccaagtggatcttgatttacgtgttttgatcacccaaaaaggtaaaaaagtatggattaatcgagttgagcaggcgaagttgtctaaatacgtaggtcagctgaatgcgattttattttcaccggaagacctcgagttgatcaagggtgcaccagcactgcggcggagatttatggatcaagaatttggtcaaataaatgcagagtatttatacttcgcaagtaagtatcggcaagttttaattcaaaagaataattatctgaagcagctagctaaaggtaaggcaaaggatcaggtctttttagatgtactttcagatcaactagctggtatcgccgctgaagttgtctttcgacgatttaaatttcttaagtatcttagtcactatgctagcgatgcttatgcacatattagtttgggcagtgagcagctttcaattgcttatcatccatcagtggctgacatccaagctgatgacagtacagaagaaatttatcaaaagattttagcaagttatgcacgaaataaggcaagtgaaattcgcaaggggacaactacttctgggccgcaccgtgatgatattgaatttaaacttgatggtcaaaatgcacatctttatgcttcgcaagggcagcagcgttcaattgcacttagcgtcaagctggcggaaattcaattggtgcatcaactaacagatgagtatcctttactcttgctggatgatgtaatgagcgagttagatcatggtcgacaaagtgcgctacttaattatattcatgggaaaacgcaaacctttattactacgactgacttagaggggatttcctgggaaataattaaaaagccgcgtgtgtatcacattcaatcaagcaaaattagtttggagaaggagaattaaatggctgataattcaaaagaaaatcttgaaaaggtcaaaaaatatgaaaaagaggctgacaagtataatgccagtcaaattcaggttcttggcggtctagaagctgtacgtaagcggccaggtatgtatatcggttcgactagttctcagggattgcaccacttagtgtgggaaattattgataacagtattgatgaacgacttgctggttttgcgaccaagattgaagttacgattaacgaagatggtagtgtcaccgttcaagatgatggacgtgggattcctgtagatattcaagaaaaaacaggtcgtcctgcattagagactgtatttactgtacttcacgccggtggtaaattcggcggtggtggatataaggtttctggtggtttgcacggagttggggcttcagtagttaacgctctgtccactaaacttgatgttaccgtaatgcgtgatggcaaaaagtactttatcgatttcgatcatggccgtgttaaggatgagatgaaacaaattggcacggttccacttgatgaacatgggacgattgttcacttctatccagatccagatattttcacagaaactattgtttttgatgacaagatcttgaagaacagaatccatgaattggcctttttgaacaagggattaactttaacctttactgacaagcgtaaagacactgccgaaacagatgtgtataagtttgaaggtgggattaaggaatacgttgcctttttgaacaagggacaagaagtattatttgatgatccaatttatgttgaaagcacctataatggcattgatgttgaagtggctttgcaatatacaaatggctataagactactttgatgacttttgccaataatattcacacctatgaaggtgggatgcacgaggccggttttaagactgcgttaacacgtgtggttaatgactatgcacataagtctaagatcttgaaagataaggacgataatctttccggtgaagacattcgtgaaggaatgacagctattgtctcagttaagcaccctagtccgcaatttgaaggtcagactaagaccaagttaggtaattcggatgctagaactgctgtagataaggctttttcagaaacctttagtcgtttcttgatggaaaatccttcagttgggcgcaagattgtagaaaagggtcaattagccgaacgagctagaactgctgccaagcgtgcacgtgaagtaacaagaaagaaatctggtctggaaattgctaatttaccaggtaagttagccgacaatacaagtaacgatccaagtatttcagaactgtttatcgtcgagggtaactcagccggcggttctgctaagcaaggtagatcacgtttaacacaggctattttgccaatcagaggtaagattttaaatgttgaaaaagcttcgatggatcgaatcttggctaaccaagaaattagatctttattcacagctttaggaacaggctttggtgctgactttgacgtttcaaaagcacgttatcacaaattgattatcatgactgatgccgatgtcgatggtgcccacattagaaccctgctgttgaccttgttctataactatatgcgcccaatgatcgacaagggctatgtttatatcgccaagccacctctataccaagttcgtcaggggaaagtggtcagatatcttgatactgacgaagaattgcatgattacttaggtagcttgcaaccaagtcccaagcctactgtgcaacgttacaaggggttaggtgaaatggacccagagcagttgtgggaaactactatgaatccagaaaatagaagactggatcgggtaagtcctgagtatgctaaagatgctgacgcagtctttgagctcttaatgggaaatgaagtttcaccaagacgtgactttattcaaaagaatgctaaatatgttgaaaacttggatgcataggaggattagatggacgagaatcaaactcaagatcatagaattaaaaacgtcgatctaactagcatgatgcgtagttcatttttggattacgcaatgtcagttattgttgcacgtgctttacctgatgttcgtgatggcttaaagcccgtacaacgtcgtattctttacggtatgagcgagttgggtgtaacgcctgataaaccatacaagaagagtgccagaattgttggggaagttatgggtaagtttcacccccatggtgattcctcaatctatcttgctatggcacacatggcacaagatttctcataccgttacatgttagtcgatggtcacggtaacttcggttctgtcgatggtgatgagccagccgcaatgcgttataccgaagcaagaatgagtaaaattgctgtggaaatgttgcgcgatatcaacaaaaacaccattgattggcaaagaaactatgatgataccgaaaatgaaccggttgtcttacctgctagaattcctaacttgcttgttaacggtgctaacgggattgccgttgggatgacaacaaatatcccgccacataacttgactgaagttattagtggtttgcacatgttaatgaaaaatcctgatgctacaaccaaggacttgatgaaagttatcccaggtcccgattttccaactggcggaattattatgggacgtggtggtatctaccgtgcttatgagagtggtaagggtaacattgttgttcgcgccaaaaccaatattgagactgaaaagagcggccgcgagcgcataattgtgagcgaaattccatttatggtaaacaaggctgaattggtgaagaaaattgctgatttggctcgagaaaagactatcgatggaattactggtgtgcgtgatgaatcagaccagacagggatgcggattaccattgatattcgccgtgatgctagtgctagcgttgttttgaataatttattcaagcaaactcaaatgcaggctaactttggtatgaatatggtggctattgttgatggtgcgccacactttttaaccttgaagcaaatgctgcaatattacttggatcaccaagaagatgttgtaactcgcagaacaagattcgagttagctaaggcagaggcaagagcccacatccttgaagggttaagaatcgctctggacaatattgatgaaattgtccacattatccgcaatagtcaatcaagtgacattgctaaagcaactttgattagccgctttggccttgatgataagcaatctcaggctatcttagacatgcgtttggttcgcttgactggcttggagcgcgataaggtagaagctgaatacaaggaattacaagctaaaattgctgactacaaagatattttgtctaagcctgagagaattgaccaaattatctatgacgaattgcttgatattcaaaaacgattcggtgataagcgaagaaccgaaattggtgctagcgaagtcgtttcaattgaagatgaagatttgattgaaaagcaaaatattctgttgacggttacccataacggctatattaagagaatgccaattcaggaatttaagactcaaaaccgtggtggtaaaggtatcaagggaatgggtgtacaagatggcgactttattgagcatttgatttactcaagtacgcacgatctgctcttgttctttactaatgctggtaaggtttactccaagaaagcctatgagattcctgaatacggccgcgcagctaaaggattgccagtagtcaacttattgcaattggaaaagggcgaaaaggtccaaactgtaattaatattccggaaggtgctgacgataattacttattctttgttactaagatgggaactgtaaagcgtacacacgttagcgaattttctaatattagaaacagtggtttaattgccttaactttgaaagatggcgatgaattaagcaatgttttgactactgatggtaagcaaaacatcttaatcgggactcacttgggctacgctgttaccttcaatgaaggcgatgttcgggcaatgggtcgaactgctgctggtgttcgcggaattaacttgcgtgagcatgactatgttgttggttcaggtattttaggtgctgatgaccaagtcttggtaatttctgaaaagggttatggtaaacggactccagcttcagaatatccagttaaaggccgtggcggtaaaggtattaagactgccaatattactgagaagaatggtccattagctggtgtaacaatcattaactcaaataatgatgtgatggtaattactactgacggaattatgattcggtttagaattgatgatgtttcgcaaactggccgtagcaccatgggtgttcgcttgattaaagttagcgatgatagtcaggttgcaagtttaaccgttgttccaactgaggaagaacaagatcaaactggtgacgatgacgactcaaaaaatggataattaattaaaaaaacaaaaaatttgaacttttaaaaaaattatcaaacttttttgcgtaataaataatgagcagtaaaaaatctgctaggatcacgtgaaaacagtttggtaattttttatttatatgctaaaattagaaattgcgagtaatattccattactccttgttcttgattttagcaagaaccatatagtccagaaggaggtgcaatagtcatggcaactacaaagtacgaagtaacttacatcatcaagccagatgttgacgaagacaacaagaaggctcttgtagaaaactacgacaaggttatcgctgataacggtggtactatggtagaatccaaagactggggcaagcgtcgtttcgcatatgaaattgataagtatcgtgaaggtacttaccacattatgactttcactgctgacaacgctgacgcagttaacgaatttagccgtttgtcaaagattgacaacgctatcttacgttcaatgaccgttaagttagataagtaattttaatttattatccgttatgtgatttaggaaaggaaggtacatgagtatgattaatagagttgtacttgttggccgtttaacacgtgatcctgaattacgtactactgggagtggaatctcggttgctacgtttactcttgctgttgaccgtcaatttacaaatagccaaggtgagagaggcgcagatttcgtcagctgtgtaatttggagaaagtcagcagaaaacttctgcaactttacttcaaagggttcattagttggaattgatggccgaattcaaaccagaagttatgataataaagatgggcaaagggtatatgtaaccgaagttgttgttgataacttcgcattgctcgaatcacgcaaggatcgtgaagcccgcggtcaaaatggtggttatacaccaaatagtggaaatgctagcagtcaacctgctaacaatttcccaaataatggcggatcacaaggtaattcacagactaataacaatcaaaataattcacaagatccatttagtggctcaggtgatacgattgatatttctgatgacgatctaccattttaaactaaattaaagaaaggattctagaacatggctcaacaaagaagaggcggccgtcgtcgtcgtaaggttgactacatcgcagctaaccacatcgactacgttgactacaaagatgtcgatctgttgaaacgttttatctcagaaagaggtaagattttaccacgtcgtgttactggcactagtgctaagaaccaacgtaaagtagctaatgcaattaagagagctcgtatcatgggcttgttaccattcgttgctgaagactaatttagatcgaaataaaccaaaaggacaggacacaaggttctgtccttttttcgtataataattaaaaaaattctctcttcgtattgtacctactgttttcaatcatgagccggaataaggtataattaacactgatatactatatctattaggaaggatcttcatgaaggattttttacgtaagctagagttgcctgaatttattaaggattcacggctgacagcttctataatcattgcactttctctttcattattgggaagcattattgcgatgattatgaatccattgtttggtttggcaatgcttttagtctttattttgaccgttgcctttgccatctatgggacctatattttagcgggtaatgcaaatagctttgcggttaatttgtcttaccggataaagcgtagtgaacaagaagcaatgattaagatgccgttgggaattttgctttatgattcggatcaccaaattcagtgggttaatccatatctgcaattatatttaaagagtacagatttagtggggcacacaattgaatcagttgaccctgatctgaataagctacttaatgaagtaattgaggcaaaaacagcagaaaatcatctggttgattgggatggtcaccgatttgaaatggtggtccaaaataatttaggcgtaatatatttattggatattacgcgctatgccaaaattgaagataaatataaagctgaacgattggcgattggtcaaattttcatcgataattatgatgagctaagtgaagcaatgcatgatcaagaattgaccagcatgagttcatatgtgcaaaatacattgagtgattatgcgaaaaagtttaacgcatatttaaaacggattgatgaagaccatttcttgatcttgatccatatgcaagaattagctgagatggagaaggacaaattctctgttttagataaggtgcgtcaagaaacgagtagaaacaatacgccacttactttatctatgggaattgcttttgggagtgattctttgtctgaaattgccaaccaggctcaatctaacttggatttggccctaggtcgaggcggagaccaggttgtcttacgtcaacccggtaaagacgcccgcttttatggcggtaagtctaatccgatggaaaagcggactagagttagagcaagaatggtttcacaagcaattagtgaactatttaaagatgccgatcaagtttttgttgttggtcatcagcgtcctgacatggactcagtcggtagtgggattggcgtagtaaaattagctcgtcttcacggagttaaagctaattttgttttagatactaataagacaaactatgatgttggtcgcttggtcaccttaatgcaacagaaaaatcaggataaggatatttttattaaccctgatgtagctttagctcaagttactgacaagtcaatgttggtaatggttgatcattcgaagtattcaattacttactcacggtcactttatgatcgtttgaagaatcgaatcatcgttattgatcaccatagacgaggcgaggaattccctgaaaatccaatgttaacctatgttgaaccatatgcttcttcggcttgtgaattggtcactgaaatgattgaatatcagcagccagctaacggtaagcgagttttgaccgatattgaagctacagcaatgttagccgggattgtggtcgactccaaggaattctcgttgagaacaggaactagaaccttcgatgcggctagttacttacgttcaatcggggctgactcagcagttgtaagcatgctcttgaaagaggacattgatagtttcctcgaacggacgcatttagtagccactttgaagatggtgaagccacatatggccgtattatgtggacctgatgataagattatagatccgatcattacagcgcaggcggctgatactgcacttgatttggaaaatgtgggtgctagtttcgcaattacgcggcgcagtgataatacgattggtatttcagctagatcaatgggtaagatcaacgttcaaattattatggaaaaattgggcggtggtggacatctttctaatgcggcaacacagattaaagatgttactattgaagaagcaaaacaaaaattgcttgatgcaattgatgaatatgaaaaagaaaatgattaggaaggacaaatatgaaagttatttttactcaagatgttagaggtcgaggtaagcgtggacaagttaaggacgtacctgatggatacgcacaaaattacttgattaagcgaggcttggctaaagaagctactaaaggtaacatgaataccttgaagcgtgtagaagctaatgaaaaggctgcttatgaagcagaaaaggccgaagcagaaaagatcaaggcagaacttgaaaaagacgataccgttgttaacttcaaatctaaggctggtactgactcacgtttgtttggttcaatctcaagtaagaagattgtggaaggccttgaaaagcaatacggtatcaaggttgataaacgcaagcttaacttgccagaaccaattaagactttgggctatactaatgttcatgccaaattatttaagggtgtagaagctactattcgcgttcacgttactgaacaagactaataaaaagtggttgtgattgatggataatatcgtttctcaacaaattccgcatgatcgcgatgccgaaagggcagttctgggtgcgatttttatcgatcctgaagcaattgcggatgctagtgcggtagttcagcctgaagatttctatgagcgggctaatcaaattgtctttcaagcgatgttggacttgtctgatcgcggggatgcaattgatacgctgaccttgcaggatgaattaaacaaaagaaatcagttagaagatattggtggtatcggttatgtttctgaattagcgatggccacaccgacagcagcgcatgttacctattatgccaaaattgtgcataggaaggcgctgcttcgtcgtttaatctctgctagtcagaagattatctctaatgcaatcgatggctctgacgatgtaacagacattctagatgacgctgaaagtgaaatcatgaatgtctcgtcagagaatagcacaggcggctttaggaccattaaagagatcgttaattcagcgattaatgatattaataatattccggatgacggaaatatggttactggcttgccgactggttttgcggaattagataagatgacaactggttttcacgatgatgaattgatcattgtagctgctcgtcctggtgtgggtaagacttcatttgccttaaatattgcgcaaaatgtagggctacacactgaaaaaagtgtagctatgttctcactagaaatgagtggagagcaactggttcagaggatgttagcttctgaaggactgattaattcacagcacttgagaactggccagcttgatgaagaagaatggcgtaaattggtagtggcttctgggtcactagcaggtgcgcaaatctttatcgatgatacgcccggaatcaagatgagtgaaattcgtgctaaatcacggcgattagctaaggaaaagggcaatcttggtcttattgtaattgactacttgcagctgattgaagggccacgcagtgaatcacggcaacaagaagtttctgctatttcaagacagttaaaaaagctagctaaagagttgcacgtgcctgttattgccctttcgcagttatcacggtcagttgaacaaagacaagataaacggcctgtattatctgatattcgtgaatctgggtcaattgaacaggatgccgatattgtttctttcttgtatcgtgacgattattatcgtgatgaaccagatgatggtgaaagtagcggtagtcaagatgaagttggcgcagaagacgataatggtgaagtagaagtcatcattgaaaagaaccgttccggtagccgggggacggttaagctaatgttttcaaagccattcaaccgtttttcaaatttggattatgcgcatgatcctaatggtaattagaaaaagcactcgatgagtgctttttctatgtttgaatataatacgaataatatttacatttataatggaaattgtttatatttggtgttgaaatgataccataagtttgctataactattactgaaaagagtaataacgaatatactcatggaggaatagcaaatttatgaaatttaagaagattttggttggtgcttgcgccgtcttggcagctgtctcattagctgcttgctcaaatggtaagaagagttcatcttcatccagtgaacctaaggaattaaacgttgagtttgtgccaagtactcaagccaacaagatggaggctaaggctaagcctttaggtacgcttttacaaaagcaattgcatatcccagttcatgtgaccgtttctaccgactatagcggtctagttgaagcaatgtcatctaagaaagtagacgtcggcttcatgccaccatattcttacatattagctcataaaaagggaattgctgatgttttattgcaagccgaacgttacggctatgatgaaccatccggtaagatgaatcataccttaatgcataagtatcgtggtatgatcgtggttaagaagggctcaaagatcaaatcttggaaagacttaaagggtaaaaagattgcgattggcgatcctagttcttcatcgggctatgtttatccagttgcggaactttacaaaaagggtttgaatgtaaccaaggactgcaaattagttaatgttaagggtgacgatcaagaagtgttatccgttttgaatggggatgttgatgccgcattcgtcttctcagatgcacgtaatattgccgctaaggatgacaagaaagcaatgaccgatgttgtgccaatctactttaccaagtggattccaaacgatactattgcggttagaaaagatatgcctaaaaaattcagagttaagttagctaaggctttcaagaatattgctaagtctaagaagggtaagcaaattatcgaaagcatttataaccattatggttacgttgaagctaaggattctgactttgatggcttacgtcaataccaaaagatcgttaacaaagctactggtggcagtaactaaaatagaataatttaattgaaagggctcaccattacgggtgagttctttttgtttctatataatatatcagttaaaatagacataaaagaaatgaagaaagaagaaaaatatgaaaattgcggttttgactgatagctcggcttatttaactaaagaacaacaagaaaaatatcaaatcgatgttttgccaattccaattatttggggcaaaaaagtatatcatgacttagtcgatattggttatgaagaattttatcaaaaactaaatacagcaaaagagctgccaactacttcgcagccttcaatcggtgatcttaagcagaagattgatgaatacgtggcagcaggctacacggatgttattgtaattactctttcaagtgggatttctagctatttctcaaccgttcagagtgttgcggcagaagaagaccgaatcaaggttcatccattcgatagtaaaattacctgtgctggtgaggcggattatgctatgttggcaggccgtttaatcgaggctggagcggatattgatttgatcatgcatgatcttaaggacttgcaaaaaacaatggatgtgcgcttcatggtggacgatttgagccatttaaagcggactggacgtttatctaatgcggctagctttgttggtacgttgttcaagattaagccgattttatcgatggatgtgcaaaatgaaggccatatttcagcgattgcgaaagagcgtcaatataaacgtgcatacaagcatgtgcaaaatgattttgataatttgactaaaaatatgccgtataagattcaggacacaatttttgattcacttgatcctgagaaaaagcaagagtggctggaagattaccaagcaaagtttcctaagtataagttcgataccagcattatcggaccagttgttggcgtgcacgtgggacaaggaacaatgtcgatgatttggtgccgtgatttggatacttattttgatgaaaatggtcagccaatcaagggaattgagtcacaagcagtagtggatccagagtaagcataataccgatatggcaaaaaaatgagaggcactattgattttttaatatcattgctatattattattaataatttaatatggcgatgaatagggatgatcagagtgtcaatcagttctttttttaaaaagttaatagccaaaaataaactcttgtttttagctatggtgattactagtgcttttgcttctttagatggcgtcatttctccttatgttattgggaaaattactaatacactttctcagaaacattttagtgagataccgaaaatcttgttactgtatctgttgatgatgctttttctgaatgttagcttttatctatggcaattttgttggggaaaaattaccaaatcaagtaatgaattattgagatctacagcttttaatacttttattgcttcccctagtgaaaagaaaatcactaataccctgaattttatcaatgttaatgttaaacaaattgaaaatcaatgtattgattcaacaattatgcttgtttactgcgttgagcaagccatcgtttcattagtttatattttaagtattaatggcattgcagcaatggttttcttagtttgtgggttaattccatcagttattccacgtttaactcgtaattgggttcagacaggaactaaaaagtggaatagcagttatgaaaactataatcaaaaaacaagtgatgctgtgcatggtttcgatactatcagacatgcaaatggtgataatagattcaaaatatttgtccaaaaagcattaatgggagaagaaaagaagtattttttgatgaattttcggcgtaatacttctaattttttagcccaggtctcttattcattatcaatggttatttctttggctgttggtacattctttgtaattaatggtcaaattctagtaggtggtttgatttctctatttttagcatcagatcgtttaactagtccaattatttcgattgttaatattgcaaatcaattgacctctgttagtcctctgctaaaaaataaagctttacaaaaatctaaaaagcaagaatttaataatttagacttcaccaaattaccaaaccaagagaaaataatttttgatcactgcaatttagggtattctaataaagctattttgaagaatattaatttgacagtttctaaaggcaataaagtattgatcatcggtcgttctggtattggtaaatccactctgttcaagacattgcttaatgaaattccattgctaaagggcaaaatactggtggatgatagtcttaaccaagctaatttctataccaattttggtattgttagtcaggatacttatatattcgctgaatctttgcgctttaatttaacgcttggaaaagattttcctactcagcaagtaataaatgttttgaaaactgttaaattaagttatttagctaatgaaaaaagcttagacatgcagatcggggagaagggattatcactttcgggtggagaaaaacgaaaactggaaattgcacgagctttattgaatcaaaaatcgattttacttgttgacgaaggactatctggacttgatgaagaaagcaataaacaaatttttgcacttcttcaaagtcttccgcagacagtaattgaaattgaacatgctgttagtccagaagagaaaaatcaatttaatcaaattattgatctaggagctcagtattgatttttttataaataaacaaaaacaattacatacgtatgaaagcctttacacataaagacttttttatttataatattagcagcacgaaaactttttggagaaaaacttacatacagaaaaggatgagaatatggcagaaaagaaatatgtcggcagtatcgaagcaggcggtactaaatttatcgtagctgtgcaagatgttgaaacaggtaaggaagtagcgcgtgatcgtattcctaccactactaacaaggagactttacaaaagactgctgagtttttcaaaaagcaccccgttgatgcattaggaattggtacttttggtccaattgatatcaatcctaactctcggacttatggttacattttggacacgcctaagccaggttggtcaggtacggacgtaaagggcttttttgaaaaggaattaggtattccggttgccatgacaactgatgttaatgcatcatgttatggtgaatatgttgctcgcggccgcaatgattctaagagttacttctacgcaacggttggtactggcgttggcgctggaattgtacaagcaggtaagttgctcggccttaataatcacccagaaatgggccacatgttggttcgtcgttatcctggtgatgattatgagggtcactgtccattccataatgatgcttgtgtcgaaggcatgtctgctggtccaagtcttgagggcagaactggtatccctggtgaaaaattgtctcgcgataacaaggtcttcacttattctgcgtattacattgctcaaatgctcttcaatgtttacatggctgctcgtccagatgtaatgattgttggcggttcagttttaaatgaagatgatttggttaaggtaagaaagttctttgatgaatttaacaacaattacgttgccacacccgatttgaatgaattaattgtgcgtcctgctgtggctcacaacgggtctgcaactcttggcgattttgaattagctaagaatttgctcaaataaaaaagcatagataaattgaataagcaataaaaaggctcaactcgttaagaaagacgtaaggcgagccttttttgacgtaatttgacctaaatgcgcgtaatattaattctagaaacgtaaccggtttattaagaaaggagcccaactatgaacaaatcagatagtggcttaaaagacaaagttatcggtaaagtgaaagaagtcgaaggtaaaattaccggcgataaatcacgcgaagtccaaggaaaagctcaacaagccaagggcaaagttaaggacaaagccaaaaaattaaaagatgatctggaaaaagaccatcaaatagatgaagattgttaaagactcaggtcgactagcaatagctaaacagaaagcaaataggtgatcctatgttatcatggatctgggttttaatcgttggcgctataataggtctaatagctggtttcataaccggcaagggtggatcaatgggatttctagctaatttaatagcagggctggttggttcaaccttaggccaagcaatctttggttcgtgggggccgcaaatggctgggatggcaatcgtaccatcaatattgggagccgtcatcttggtactagtggtttcctttgtactagggatgcttagaaaaactgaataaaaatagaataagagaaaaaagacatgctgggcatgtctttttttgtgtttcatgtgaaactattttagcttttttcgttcattttctttctcagctaaaaaacgttgcttaatttcttcaggcaaaagactagggaccgtcttgtcataaaattcaaagaatatgggtgccttgttagagtcattgctcttgggatataaggcaaagtcactttcgctaaacggtaagctgatattaccacgtaaagcattgataatctcaccgaacatatgcaaaacataacggcgcgtctcaggctctaatgacatgattacgcgactgaaacggacagtgcctaataatttatgggcagtaatttgaaaaatatcggtaatatttaattcatcaaatgcttggaaaagagcatcccataatgcaccacgttgcttttcagggatgctgtggttaaagtcgatgaagaaatgccgcaaagaacgtgcacctgaagtaagtccttctgctagaacaaaactatcacggccaacagaccaacggcgtggatcatgttgctggaccatcggtgcagtgcttttgacgattaaaacgtgttcaggatgatcaagcatggtgccaatgattgaagcttctgggaggtaggtcttcatcttgggtaatgcacgtacaaagccaggtgctttccagacttggtggaaaaagccggggccgtcaaagctaaaggccttgataatgcggtcttgcaattttggctcggctacgcttaaagcatattcagcgtaattgccgcccttagaatgccctgctaaataaattttgtcatggggaaaggcggcagccatttctttgagataattggcagcaacatcttgaccataaactttgggcatgtagttcatattcatgtcttcgttccagccgatgattgagttgtcggttccgcggtaaacgatgataattgtattatcgtttaggcgaaaagtagccgcggtaaattgaagtggataaggatccttttccagccgattagtccaattaaggattttgatgtcgcctagacgaggtgatttaggtaaaagaagaatttgatcgccagctaaatctttcatttgaacttgaaatgaaggaaggacgtgtaatttttctgcgacttcacttaaggtatgttccttagcagatttgtcgacgggtaagtagatgattgaggcgaagagggatgcgtccacgctattaaaaggccgttctttaaaagaaagatctccccgccaacgtaaataatcaagtgttccagccataatctcatcctttcattaattaggcaatattactattttactaaattgtcgcgccaaaataaaaatctcaagctaatgcttgagatttaaaatgattttacataccaccacgggtatagctaatgcgagtaatatcaggatatttacgtagattcatgacaatagagttctcatcaatcttattattaatgattccgtcaacgtataaaacaatacggttatcactcacgtcgagaattttaacagtaacattttcgacgtgattatctgctagttcttgcctgattttagacaaaatgtggtgctggttaatagccacaatttgaatgttaaaacgaacatgtggcgttattttgttgataatgacatcatcgtgaaagatcatttgaatgataaacaatagggcggttgataggataccgatgaaatacatgccagcaccaacagccatcccgatggcggcagttgcccaaactccagcggcagtagttaagcctgagacctgttcttttctaactaggattgtacccgcaccaatgaaggaaattcctgtaacgatctgagccgcaattcttgatggatctagtgcaatgtcatgcatgcttaatagatcggtaaatccatatttagatacgatcatgaataaagcagaagcaatcgcaactacgatatgagttctcacacccgcgctttttctctgaatcgcccgctcatagccgattaatgcgccacaaaaagctgcgacaacaattctaagtagccaatctaattcggttgtaattggagttaaagtttgcattatttagtcctcatcctttgtataatcaacaattattatcatttctattttaacgtaaatgcagaaaaattatagtctggggaatttttttgaacttttttcaaaaaaagacttgcacagtttccatctatatggtttaataaatactgttgtcgggtaagacaacgaagagttgctgacttagctcagttggcagagcacctcactagtaatgaggaggtcggaggttcgaaccctctagtcagcattagttaaacaatttaatagtttttaagtctatcaattaagttcgaaagagcttgatatgataggcttttttgttgtttctagatatttgtgtagatttaaaaatagttatgaatatttagtttcaccacaaaaattgccacacagtttttctagtgtggcatctgtgtggcaaaggttcgattaatgttgtagtggcgggctttattgcttgccatttttttcgttttcaaagtatccatgatttaagaatgactgtcgatactcttttaagatttttatttgatggtctatggcaggaactaacgtatatgcattatttttattgtagaattcatccattaatttagtattcgattccttgtagtccttaatgaaattactatcattttgattcataataatttcttctaactgcatacgaataactaaattaacattattaatcatttcaagatcattggcaccttccaatgattcttcaaattttttatcaaataaaaatttgaatttatctttccaaaaatttattacgtatgatttctttttataatcttcatcatttttagtaaaagaatcagcggtatctttatctccatttatagaaagaaagtgagaaatattatttttcatattactcaattcttcattattatcataatatgctgaaaaaagtaaattaattaacttactctctacttcttcacctctaattccttcgccttttacataagatactggaactttaaatatttctgctaaagctttccatacctcttcatttggaattctgcttcctgcttcgtatcttgctattgttactcgtgtagctgatatgtttttgttctttaaaagattagatagatcttgttgtgtaaaataatttttttctcttagttctttaattcgatttggagtcatattattacctcactaagattaattttatacgattggtacataattagcaaaagtaccaattttggatacaaaagtgttgactacaagaatgaataattgtatattatatgtaaccaaatgtggtacacaaaattataaataaccatttttggaaacgaaaaagaaagagggaatattaaaaatgtccagtaatgtaacaaagcaaggtgaagtactatctaccttcaacgaaagtagtagtaaaagaaccccaattcaatcagcattaacaagaccgttggttgagcaattggtaagtgttttctattgttgagcggaaccacagaagaagttcaagatcctaatgatgagtctaaaactattccgcgcgcagtatacgaagtaagagttattagctctaaaactagattacctattggaactgtgctaacggtgaaaattaaaggaggtaagagtgtaattactgatgaagagaataagaagttactgttaggcttagagaaaaataaggtagtagcattcgacgatctaagtcattggaactttaacggaaatgagggattatcagcttcaggtatgcgagtattagaagtcagtccgcaagaggctatgaatttatagaaatgaggcggcttatatgaaaataaaaaaattagtcttagataccaaaaacccgttaggcaatcctaacggggtaaaaatggcattaggagtaactttattatcttcaattggtcttgagtataaagttgcacctcaattcataaatgctggtaattataccgcattagcttatccatttttaattaatattatacctctagggtatccatgctggaaatgggttaatctccatatcgttaattataagatctataagcaattgatgaatattgttcattcggaacaattaatagactatggagataaaaaagaaactaccactttcggtgaaagaaaagttgaatatggtgtcaagatcgtctatgaagaaacggcagaaggtacatatattactgtatatcctaatggtataaaacatagcgacgccactcagacgctaaacaataggctagaggaaactttcaacatgaatgttttatcggtagatcatcagctagcttatacgaaatatttattgagaaatgtaaacagacaaagaatggaggtttctaatgataacttctaatttcgtaataaatcttgataagaatacatcattcagttttaaaggtagtggtgggattcttgtcactgggagaagtggctcaggcaagactaataccaccacatatataatgctgaaggcgatgtcccaatgtgattgcggtttatatattattgatgcaaaaagagctgatatgtatggacttcatcaatttttaaaagatggcaagaaggtagtggcaagtacaacaaatcaaatagcacgattgttgcgtgttcttaatgagaacatgagcgcacggtatgagcattttaagaatggaaaatggggacaggatttcgctgaatatggatatagaccatatttattagtcattgatgaagtatctgcgatgttggctggggctggtaagaataagaaagaaataatgggtgaattgcgtcaagttatccttcgtggacgacaagcagggatatttacccttatttcagggcagagaattgatgcaactattttagatcgtgatattaccttacagttaggtacaagaatcgtgatgggacaagcagattcggagacttatcgcatggcttacccaatggtaaatgatattaaagcattaccattagtacctaataagccggggtatggtcttatctattcagatgggcaaaaaattagcaatcctactccatttgtctcaccggatatgtctaacattgatgttccaggggtaattacgaggttagagaataattttgatccatctaaatatattgatgaatcaagctattgggaggtttagtaattgataagttgccagctggcgggcgacagagtcgcacgaatggaatgtccaagcgtgagcgggctggcaacacccaactaataatatgggtgtaacggaaagattattaatcatggaaacgatgaataatattaaaattgatcaacttcgtctaaatattccatatgatgaaatctatcaagtagaaaatagtcaaagtttacccaaagaagttatagtagctgataatctgctgcatctggcatggttgtttaagtctaatacagtgagtcatggacataatggctatacttcttcatataatttcggttcaggagaacaaggcggaaatatttccgtaatgtggaacgagtcaagaaaagatatgggaatactagtcgactttactgcgacaggcaaagcgctatatgaaagccttgctgaattacatggaattcctgttaattggaagaaaataattgaagaattatatgaaaaaatggggcatatatcgaggctagatatagctactgaccttattaattatggtttttcagttaacgaaattattcaaaggttaaagaatgaagaatcatttttcttgaatactcaaggaaataaaatcaatgctaatcgatttaagataattggaagctatagtgaagctcagactctatatatcggtagtagaaaaagtgatgcttttctgagaatttatgataaaaaagttgaacaggatcgagccgatggactctatagaaacttggctagaaactgtaacgattggataagagtagaagcagaatttaaacaccgtttagctaaagaactaggaaaatatattacaacattaactgcagataatatttatccttatttacttggctgtgtactagaacgttggtcattagttgatagggaagaataatgacatatgaaaaattccaatattctaaagaatggaagattttaaaagagttatcgaaaggacaaggacttcaagaactaaaacaagctcaagttgacgcttccctgaatagaaaaattaattggttcttgtatggtggtgccagtggagttattacgttgattaaagaaatttatggtgatgaagcactaaaaaagttttatcaatttttagattattttatttctaatcctgatacgttaggacattactaccactcggacaagataaaggcggatactaaaactattgcagattctacgcaaggcttgaactttggagaatatttagaagacttaaagagagaattagttgagggagataaacagaaaggcaggggctaatatgtttggcacagagttactcaacgctagacaaatagcagaagaattaggtattagctatacttacttttttaaattaattaaaaatgggtgtccttatcatcaacttggagaccaaggacgtaaatattacgttttaaaggaagtacaagagtggctattagtaagtagccaacattaattagaagacgtagcaacttgctacgcttttttaggagaaagctatgtcaattacacaaattaaaacggggaaaaataaaggaaaataccgtgttagaattcaacctactgataatgaaacaggtaaaactattccgattcctagtaaagtaacaaaaactagcagtaagcgtgaagcaaaacaattagaagaacaaatgtgggtgcaatatcgcgcgcataaagaaatgaatttaaatgtattagatcaaccacttgcaaaagctttagatcactatgtagaagaagaaagaagttcggggcgttggtcatcgattactacgtatgataattggaaatatacggttaagcttgtttctcaatatttcggaaagaaaaaagttaaagatatcaaagaaaaagatatgcgtagttttgctagaaattacataagtacacataaagcaactgtggcacctcattcaacgctagatagacagttacaaaatttaaggagttattttgctactttgaaggaatatggtgtcttaaagaatcctattcctatgaagccattaactaagttttttagacgtgatgaaatgaatgcccctgttaagaaatatgttttcactaataatgaaattaatgttcttaaagatagaatttatagagagcttggagtaacaagaataagttattggacaactagaattgctatcttgatagctctagatactggaatgagacctcaagaaattcaggctttaaagtggagtcaaattactaatgatggaagttttaaagtttttagaataaatgactcatggaatgaaaaagagaagcatcttaacggacatttgaaaagtcgaccgcatggagaatctagactaacccttcccctttctgaaccacttttgcagttattgaataagtttcgtcattgtcagttagaacttttaaaggagaatggtttaactaattttaatgatcgaattttattgaacatcacagattatcacttgtgcgcattagggtatccaataactcaaaaaagtatgaatgatatgttgaaacagttgagtaagaaagtaggggttaataatcaaaatttaaatataagtatgtatacttgtcgtcatactgtagcaacaaaattagggaatacaccaggcatgtcttacccttgggcggcaagcagattagggcattctttaaagatgtttatgcggacatatgtacatgttgatgaagatcgaaatgaagaaatgcttagattgatagctaaaagataaaagaaaaatgcaaaaataacttatatttgataaaaaaatgaattaatgtagtaatagcaagaatttgaaaataataaataacaaataatttttaacattttatagattttgaaaaaaaaagagcgtatactcagggcatcataaagagatgtgaaggagaaatcaaaatggttattgtagaacaaaagtttaataaatataatcatacaagcaacatggatgctatggagtacgctgcaggatgttgcacatgtacaacaacaagttgtacaacttcatgtgccgctgtagctgaaagttaatggatagttggcgctgtaaattatattacagtgctttttttaggagtataaatactgttatgtgtctattaagaataaaagacttaaaagttaattttaaggatcaaacagtactggattttagaggtcatgatatagagataaagtcaggagacaaagtagctctaattggaaaaaatggggcaggaaaaagtacactattaaattgtcttttacatgaagtaaaatacactggctgtataaaggagaagtatcatcagtcggatataggagtagtttttcaagaaaatgtatattttaaattcttgaaagtttatgaaatctttgaattagtgtggaataaacctaaaaagttaattttaaaatctaaatttattaagaattttaatttagcaagcattatgaataaatacatttctgacttatctggtggtgaaaaacagagattaacaatagctttggttttttctcaaaataaaaagatttacttactagatgaaataaattccggcttagattatgataacaggcatgaattaagtaaaatcataaataatattactgaagaaaaaacagtaatacaaataagtcattattttgaagaagttgaaaattgggctaataaattgataatccttgatagaggcaagatgatatattttggaagcttatctaagttttattctataaataagcatgattcattaattattataaatgataaaaaaagcctatctagactgacccagaagcctttaaatctttatagtaataaatatattgtatctagtagtattgatgagagacatgatataacaaatttattagagcaacaaaagatagattataaagtggtgccacaaaatttatacacaacttataaattagcattagtaaaacatgaggataggtaaaataatggctagagaaattttattaagtttaaaagcacaacttagagttccaattgctgtatttttttctattttttttccaattattatgatgattatgatgatgacatcttacggtaatttttcattaagaaatggatatcactttatagataagtatttttttattagtactactataggtattctacctctaaccttaattagttttcctattgatataaataatttgcttgaaactaagcattacttgcgtttgaaatacttaaatgttgatttaaaaaaattatttttatcaaatattatttcttatttgataattgtatttatttcagttggaataaatttaatagtaggaaaaagtatatataatttaagattacctagtatagagtatttatgttatttttttattcaattattctattgtgcgatagttctacttatatttggcttactgttaagtttaatagtatcagatatcaaagctttaatgcctgtaggaatgactataatgtttatattatttatggttataggtgtttttgtacagtatagctccttaccgaaaattatacgtactatttctagctacataccagtaaaatatttggcaaatgatttctattatatctggattggtcaggctaaatggaatatgccattttttaaatgtaatacgatctggcttatttttctgtgtttgatttgttacataatttatagaaggaagaataatgttacgaagattttcaactagtaaggatttaagaattgggatagagataatagttggaatcactttatcatttatcattaattttataatgatttcaattgggtatgccattacaaatagtgaaaaattaaaagaatattcggtcaattattttggattagtcatatataaaataaagaattatggaaataaaggtataccagtttccaataatatgatgtttatcggaatagttttaacaataatatttgtttttattgtagagtgggttgtatataagagggataagaatggtagagtatgagcttaaaggattatttaatcaaaatacgctttcaacatcagatattagtaataataataattacaataatcaacaattatttgatcatattataagaggaaatgctaattctgagatgctgacatacttacttaatatgaaccatcagcgattgaatgattttaagagtatgcatcaatataattatggaaattttgcatccttaatgaacagtgtagaacagtataacgaaatagaaaatgatgaaactattttgctacctaagccattgagaataaaaaataagttacagcaggttctaaagaaaagaaaaagtgttagaaattatataggcttatcatgtgatttacgagaattgtccacaatattgatgtattcatttggaatctcgggaagaaaagagaattttggtggaatagtcgcaagtatgcgatattacgcttctggaggtgctctatatccaatttcagtgattatatatataaataaggtggatggattgaaaaaggggctgtatttatatcagccaatgtatcattccttattaccactaaatattaaaactcaaatcgatattaataaattatttgtaggaagtaacattgatgttaaaaatagtagcttttttgtattttataaatatgcgattagttctacatatttaaaatatggtgagctatctttagctaatattttgattgaagcgggaatgatggcgcaaaatttttccttagtaactacagcatgtggttttgggtcatgtccaattgcaggatataacaaaagatttattgaagatatttgtaatttagatcatgttaatgagcatataatttttactgaaagttgtgggagaaatgaatagcgatacgattttttttgtaaaaaaagatacacatattaattctaatataaacgaatggatattaagtaagggaataattcataaaagcactttaacaataagtaaaaatgaaagtagtactttgtttgtaagtttattcaagcaattaatacaaaatcaggaaattaaagttagtgaagatgatgaagagtattcagactttaaaaaacttgttcagcttggatttttaggaataagaaataaaaataaaaaagtagcacttattgtggaagaaagtgcaaaaaacttctttgaaaactatttaaaagatgaaaatatatgtgttagctcattagatgagtttataactcaagatacattaaatattttaattgaagaaaaaaataatactaaattaaataaaatagttcaaaactataaaaataaatacaaagatgtagatttgatttttgtttgttctttgtattatgaaaattatttaaaaggaatcaacaagctaactaaattaattagtatcccatataatataggattttatgataataacttaaacttcccacacgcaaaattgcttgtttcattgtgattctgcgtgttttgacaaatataaaaggcacaagtccttttcattgctataattatattgaccaaaacataatttatttgcatgaaaggcttgtgccaatgtctattttaccatctcctgaccaactattttcaaactcaatcatcagcttcatcaagaagtttcaggtgatcaagctgttgagaaaatgtggcttccgcaaggaaaaaggcattagcctgttcagcttgtttctttacgttttaagcaatgtctttcgtgaccgcagcttatatatgcagctgaaaatggatcattttcaagaaaatttttccaagaactcatattaccgttttatgcgcaacgttcacgtcaattggctccacttcaccacacttctgtctgcgcaaatcattaataaccacttgcgatctttgacttcagaaaaacgggctgattgctttgttgtcgatgattcctacttctctaggaccggcttcaagaaaacagaattagtcgccaaagtttttgaccatgtatcaatgacttacaagaaaggttttcgcatgatgaccctgggctggactgatggagcttctttcatgccaatcaattcagtgctgctgtcttctcagaagctacagaatatgattggcgaaaataaagtttttgatcagcgcaccattgctggccaaagacgtatgcttgcccggactaaaggcacagacgtgatggttaatttaatcgaccaagctatgaaagcaggtcatcaagccaagtacgtgctgtttgacagctggttctcaaatccacatcaaatcgtccagctcaagcaaaggaagctggatgtgattgccatggttaaggttagctccaaaatcaaatatgaatttgagggagaacgcaaaaacatcaaacagatttatcgcagctgtaaaaagcgatgcggccgttctcgctacctgctgtcaatcccagtcaaagtcggacgccaggacaaagacggtgctaaaatagatgcacggattgtctgcgttagaaaccgtgccaatcgcaaggattggctggcaatcatttgtaccgacatgtcgcttagcgaagatgaaattatccgcaactacggcaagcgttgggatattgaggtttttttcaaaacttgcaaaagttatctaaaactaagtacggaatatcatggcctgtcttacgatgctttgaccgctcatgttgccatagtttttactcgctacatgcttatgtcagttgccaagcgggacgatgaagatgaacgcacgctaggcgagctgttctattgcatgattgatgagctggcggacattacttttagccattccttgcaattgattactgatgcaatgctggccagcgtaaagcaagtctttcatgccagtgaagcacaaatagctgaattcacggctgactttatcaatcgtttacccaaatacatgcaaaaattgttaaagaaaactagcaaaaataatatagaagcctaaagccaagcaagatcaagagattactggcttatttagtgtgggaagtttaagataataataatatatttgctactagaataatacatggagagactggctgctatcaatgtcttgaaaatcaaatactacaaaaatttgatggatatatcgaagattatgtatcagaaatggattctgaaaaacaagtatttgatataaaaaattatggagtattaatatctataattaagtcagagatagaagaactaaatttatactctgatacagagctacgaggaaatgttcttcatttttatttacctacttatgaatacaattttgataagaatagaattcaaagtgattgctcagtttgttctactataaataatattttatttaaagaacaaaatatgaaagcgtgcaatattttagccgaggttttaggtaatgataaatatcaagaataatttagaatataatttattgcgtcaacggatcttgggtggcgctataactggaatctggaaaaaggatactttctttattggcgaaagttcgtatccggtaatgaattataattatattactgcaaactttactaattttgaaaaattcgcttttcctggctatgttcccccgattaattatcatcttagtggctacggcttatcttataataaagctttatcggcttttctaggtgaaagtacagaaagatattctttttcagtcttatatcaaaacattaagcataatatcatttattctgattatcaaaatcttcagaaaaagtattctaattgttatatagtacctttaaattatattaatatttatttttcaaaagaagataaagaaaattatataactaaaaaagatccaataagatggatagcattaaattcactatttgatattaataaaaaggtactagttccgcttcagttttatattatgtataccaacagtatatttaaaaatgaaaaaagaattgtaaatagtgctacatcaacaggaactgcttcgcaagaaagctttgataaaagtctggaaaatgccatagttgagttcttacaaatagattcttttaatctttggtggtatggaggtctaagaggtaaaaatttaaatattgatacagaaggcttattaaaggaattgttcccaaacaataatagactttggatgtttttaaaaaaatttacggttaattttatagatattagttttgacaaagcaattaatgtagttgtttgcgaaattaccagtaatagtgatagtaaactacctaaatatgtagtaggagttcaaggaggattttgtttaaataagtgtattgaacgatccttttttgaatgtgtaactgttttagaatattgttttactcaaagttgggttgaaggttctaaatttaaaaagatttctacaaatatagatgatttaaatgtaaataatttagacgataatgtattgttttatgctaaaaatggaaagcctaaattaatcaaaaaagagaatattttaagagtgtccaaaaaggttactaatttaaaagatttgcttttgaatttaaagagcatctctaagtatgcaggatatttaaatattacgcctccagaatttagaaatcaaaactttgaaatatgtagagtatttataccagagcttttaccaatttctttaccgtcttatccgccttattatcatccaagatacagtaaaataggaggtattattaataatgtcccccatcctttggcttaaaatagcttttttcatcactttgtttccaggcggaatatatttgataataagaagaatattgtccagccatagaaaaagcataacagtatatttaataaccttggtaattgtagctattgtaaataccattattttaaagatcaattttaataggtatattgaaatcatcttaatattgattattccttttacgtattatttttttgagtatgttataaggtataaaagattcaatatcttaagttttaaggctaataaaacaattatttatgttttagttttttttcctatatttgaagaagttgtttaccgtttctttatatttaaatattgttcggttttaggcttttctggaatacaggctatgatatttgcaacgttatgctttgaattttcgcacatatattatttaggctttaaagctattaataaattatttttttcctttattcaaagtatgttgtttttggtttttcaaagtttattgttaataatatgtttacacataatttttaatttatatgtgtatttacacaaaaaagatatgtataaagttattttttgatattgacttgtattacgtatataacaatatgtgccacacggtttctagaaaaatcctaaagagtgctaattttaaaagcaaaaattgttaagccttttacgcttctagtcagcattagaaatacgtttaagtctttcaaataagttcaatgaagcttgatttgaaaggcttttttgctactttgaactagaatgaaattctttgaaataataaggatttatttgaaattaacacaattcaaacacacagatacgattcatgtgttaagaatgtgcttgaaggaaaattaagagtactaaatatagtgatttaacaggcgttggagcctgttttttttgtgtttggttagggcattttgtttaaattaaattcagtggatttttgtgcaaaaaaatagccatattgtagggttatacatattgactattttctattattaaaattatttcaattcagccacaaacctaattccttgataagaaggaaacttgtaattatcccatgaaaaataagtgtctggaaattagttctttctatttaatctcaatgctatttcaagttagctattaatctgtatcctaagaatccattgctagattttggattccaagcaatacctacaccaatttttgtatattgaccagataaaagaatgtctctatgtccccaattagatcctgcatcatgataaatgaaattatttaagcaaatttttgcttgtgtagatggggtatcagtattatcaactgcacctccagcaagcacttctgcgtattgagtgcggcttccgtctggccttgtatggctaaaacttgtatttgcttcggtagctctagtccttgcatattcttgcagagaagtatcaagtgttaaagaatttagtccctttgattgacgtaattgatttaattgcgcaataaattcttgttctaatttggtagcaaaatcagaatccttaatgtttgtatattcattattgggttttgtatttgtggtttcattatgcttaataaaattgcttgaattagcactttgagtatttgtttcatcggatgtacttttagtaatagcagatgttttagaagtgtcaggttctgaaactttgtgagttaattctgaactaatccatttgttagttccaactttgtaccatgttttaccacggctatccttcttttctgcataaacatataagtattttttaccatgaattattttagtgcggtaagcttttacacttctgcctttcttgagtgttcttgctcctttaatacgcttgcctttatagttgtaaacataagcattgtgagtaagttttacgctgctagtgcttgcttctactacattggcttgttcgttgccagcaacaactgtagctgaaagcaatagagctgatgaaagcgtaatggttgatagtaatttagtaacgtttttcttttgtaacatggtagttacctcctatattccttatttcagattagcaataagactgtaccctaaaaatccgttacttaatacgggatcgaaagcaaatccaactccaatttttgtatattgactagataaaagaatgtctctatgtccccaattagagcctgcatcatgatagatgaagcttctcaattgttggctggcttcttgctctggtgtacttgtgtcgttaactgttcctcctgcaagtacttctgcatattgagttctacttccatcgggtctaatatggtcaaatttagtattggcttcattagctctggttactgcataagattgaagtgtattatctatgcttaatggcgctaacccattggatctacgtaattcatttaattgagttacaaaagattgttcagtttcatttgcaaagtttgagtttatgatatttgaatacgtctgttcatttgaagccgaattattatcttgttgagtaatactttgtgaatctgctttttgacagtttttggaactatttctttttgtataaaatttatcagtgtcagtagcaagtatccatttgttatcaccaattttataccaaattttatcgttaactttttcttgagcataaacttttacagattgtccgactccaatgtattcgccagtaggtgattgattgggagctttatatgtttcacccaatccattatctgtaatttttgcagtgaacaaataatttgattttgtgttttgcacatttgcgagcctgatatagtgatgactaccaatgtataaatattttgtgccacgtattttcttagtgcgataggcttttacatatttgccttttttgagtaatttaacacctctaatacggttgcctttgtagttatagacataagcattatgcgtaagtcttacatttttagtgcttgcttccactacattagcttgttcgttacttgtaacaactgtagctgaaagcaatagagtggatgaaagtgtaatggtcgatagtaatttaacaacttttttcttttgtaacatattagttacctcctacggatattcattatttcaatttctaaattaatgatacatgatgtgaaaatgcatttcactgctgtttttctttgctggaattatatttatctctcgtaaatttataaaaaagtaaaagattgaaaagttaggtgcatcatttaatacaaaatataaactgaaatagattctcgttgaatttgacaagcaatatacagaaattatcaataaaaagtacgttttgctataccttttcataaacctgactacaatgagagttgaagaaggcgtttttgtatgacaaaagaatatgaaaaagaagtcaaagaagcagaaagcgtattggaggaccaaaagttaactgatagtgagatttcacaagaattgatttccaaagataatccaactgaaaatgtaaaaccatctgagattgatttcttgcgtaaaaagccaaatttgacaacgcaaattgatttcactttgttagctgatcttgctgggttatccaaggaagctaaggcagaagcggctgtatagataaaaattttacgtagaaaaaagaccggtttgaaccgatctttatcttataaaaatttactttaggagcgtttgtgaaacttagctactccccaactgattagatagaaagtcgaaatcaaaatgaattgaatttttaattctaaaatgaatagtggaaagtaaaataaaacggaaaacaatagaataatagcgtaaattccttcgaatgttagaaataatctgtttctttttctatttttaagtgttgctagtatcattttttcattcacaaagatccctcctaaaaattatgaaattaagaccaacttaaataaggaatagtccatcggataggaacacctaggagccaatgtccggagctgagaaaagtgttttttaacacaacggtagtaacaattgcaataactgcgagtactaccaataagattagtaatgtactttgtttaatttttgacatgattaatgcatcctcctaatattttttaaacttctattattttgctgggataatgaccggtaattgccaccacattactgtagcctcctcccttttttaatcatttagtcggtttggttaaatactactccttagtgactagaacagattaattttgtatcacatagtttacaaattatttgggccaagttttaattaaatcttgataaccatatttttgtacttcatttctaattttttgcgcttcctctttattgtttaaaaataaattctttaaatataaagcagcaatcttataaagcaaaaaatgtatggttggttttgattccatgatgtagtcaattatttttggaacatgcattaattgaagtgattttttagaaagttttctattatagcaaaccgctagataattctcgaagacacgcaagtatctttcttgttctaattcggagatatttttattgcttttcatctcgttaagtagtctattgataaaaaatgcaagggtatcttgttcccagagcggcattgtattagtaaaaagtcgcagtaattcaggattagtcatccagttttgtccttcgttaaattcaatgaatagatctttttttattttgggatcgatttgatttaatttattttttaaatatgctacagaaatcatagctcttaattttaaaatcttagagtgagattgtgacagaatttcttgatagcatgattcaatttcatcaatttttcctacattgaaggcttgttccattttattatttaaatctgattcaatctttttttgctttgaagtataggttgctcgcaataattggtaaaagtaagtaatatcaacatcatgttcaaaaagaatcgcggctaatttatctgcactaattctgctttttcccgcttctactttcgcataaaaaggccgagtaacaatgttagcagccatttctttttgagtgaggtctagattttgtctaatttttcgtagtgcttgtccaatagtcataaaaaatcctttactctaaaatattttcttctctacgatatatgattattataaatgatgaaaatataagcggataaattaaagagaactatggatatcggaacggcattaagacatttgagagatgatctaggtttgacacaaaagcaaatgattcaggggacgaaaataactgttagtcactattctaaattagagaagggacaaaacaggatatttatcgaaaacctagtcgagatattgaagcaacgaaatatttctttatcatattttgttgatcactatcttaatgatgaaaatagtgaaaaagaagtaaattattcagaaatattaaatattgctttttacgaaaaagataagatcgctgctgaagaaataaaacgacaaattttttcagataagagttctagcaatgaattgagagatagagcaacattaattgtggatatgatagacaaccagggacagagtaatgttgatgctcgaatcattaattctattttcaaacatgacaactggactcagtatgacgaggcaataatattattgggtaatattattagaactagtaatgtattaaatatgagtcctttggtattgactctaattagaaaatataaagatctagataaagaaaaaatcgaaaaacaaagaaggttagcaacggttggaattaattatttatttaattttcgaaagttaagtaaagagtttaataaaactgtgctaaaaattataagctggattaaaacaacatcgattgttcctgagttaggcattattcgagaattaaatgcatattttttagcagtttatgaaggaaacatttctgtctcaactaatatcaaaaatgtccttaaaatatcaggttatcaaaatcttgctaatgatttacctaattaatcccctgagaggggattgagttgctgtggaatgagaagtagataaaatcatagttaattaaatatgaaagagaggcatagtaatttgattattgttagttatccagttttacctgaataactctgagttcatacagtacgaggagatataaattatgaaaaaaagattttgttaagcctaagtttagtagtattaggaaatactttgttttttaattcgagtgtagcttctgcagcgactaataatagatattccgtaaataatacaattcgtcaggcacctaatactggcgatgttcctggtggatggggcattactcctggtcatacacattggggctaagtgatagaagcgatgaatgaattttcattgctctttttattttgggatgcgaattttatgaagaaaagtaaaatcatatttttaatagagcttgtattaaatattattgctgctgtttttctagtaataaataattcattcaaaaatttattagatgtaggcgttgtatttttactacttctattgcttatttggaattttttaagaagaaaaattgagattagtttaaaactatcatggctcaatcttatgatattaccagcaatttttacttattgcttaaatactgtagctaatgttttattggtaaaatatcctgttaaaagtgttttaatagctataatttatagtttgttattcttagtttatttgcttccggtagtaattactaatgcgggattggttaagaataagtatgctagagtttttattgcaatgtattatattgtgctattactttttagcgaaaacttacatatgaatgactacttatcatcctttgtaaattggtctcactctgaaattcttaatgggttagcgttaattccaatcatattttgcttatttaaaagttgggatattcgagcaaagcttaatcttaaatttaggcgatattcaaatatacagttaatagttttattagtagctgtattctttgctgcttggtattccttctttcatagctatgtttatattgcaccaactttttcgcaattattttggaattgggacttctcggaaattatcccaactgaacgagctgttttatggagtttaggagcgattttattcgaagaaggattccggtatctattaataattgtattgcttgaagtttttaaagtgcaaaggggtcaaattgactattttcttgagtgcgctattttttggattgatacattatgccggactacttgaccaaggcccaatatttataatttcaacgcaagcaatttttgcttttggttatggctgctttttggcgacactgtacttatattctggaaaattctggttagtattgctttcacatttttcattagatcttattgcattctcgctttctgcaggtggtggtggaatactatcatggtatggcaataatgatctcttgagtaatggtttgagcatggtttttgctttagttatgacattgattatgtttttaggtaaacaaaggaaaattatgcaagaaaatgctgctagattaattaatgcatgatgcatttaagatggtcgaaagatcatcttttttatgcaataaagtgtcatatataattgacacctactataaaagttgctattattttaaaaacgtcacatataaatgacatctaactagatgaataaagaagaattcaatgaatcgagtaagagaatatcgtaagcaaaagcaaatatcacaaatggagcttgctagacgaataggggtggcaaggcaaaccattaatttgattgagaatgataagtataatccatcgttagaattatgcctaaacttggcgcatgcattaggaacggatttgaatactttgttttgggatggggatgaagcaaaatgagacgagaaagtttatggcttaagtttgtcagatattggtatggcattgatagtaaattagacgagcggcaattagcagaggttgaacgaatcggtaataatgcctatgtaatctctggtatagtggaactgatcttactggttatcacgctaattatggcattgactattaaaagtgagctggctttgtggtttttacctttggcgattgcaattatgatgctgatgatgagtgcttatacttatttgacaatgcgaaaatttaaaatattctctgtcgaaattacagcagatgaacgccccaaagcaattcgtagaatatggataaaggctataatagcgggaataattggtgcagtttttggtacattaggtagcgcgctaggagcttcttctgtgcaaaataatctagtaaatgtgcttgatttttggccacaaggtttatggctaggcgtatgttgcggtgctggtagtgcgattggaagagtgcaacgattgaaagtaattaaagaagacgaatgtgtctgggaaaaaactagcttccagatgaataaaaacgatcaagatttccttttttaagaatcttgatcgtttttttgttctctttaaaatttttaacaataaaaatcggcccttcagccaccttctttgacaatatttgttcaaattcatcatcataaaggcaattccgatatcggtttcgaccttctctttacctcgcaggtgcgttctgcgcatgccaaatacgttcttcaaatgtccgaaaactggctctacatcatattttctcatgccatagatgtgtctgccttcttcgctttggagaacttcttttgctttttcttttaaatattgccagttaggattatagcgaacttggcgctggcggccgctagctgttttagccaattgttccaattctggcgttagctggaactcgtctgcctcataaaccttaaaatcacggacctgaccagtagaacgatccttgcgctggctgtaatatttgaaattgaatctgacgccatgatgatcaatgtaataatcatctttttcattgtagtaccagttgattagcttagttggatcattcttatactttttggtctgttctttttcatacatagtgtagggaataaagtacttcttgtctggatatttttcctccagcatcgaataattgtattcactgccatagccagcatcggcgacgattttgtcaaacttgtccaacacggtcatttgatccaaaaccggctccaaagttttgaaatctgtcggattaggaaagatggcataatcaactacatattgatcggtcgtgactgcttgaatattgtagccaggctttaattgaccatttttcatgtggtcttccttcatatgcataaaggtggcgtcatgatctgttttggaataactgttgcgtccggcaaagatctcttcggcttcttcatatttttgcattcttggcacataatcttttcttagccggtgcagaatcttttttagtccacgtcgcttggcttttcgaggtgaaccgccaggaatggctttgttttcctgctcaatctctttagtcagcttgttaatttctgcttcagtttcttgagctaattcctttagcccctgactagtttgaactttttctttttccatttctttgactacttctttagtaatcaattcatcataaagttcaactgcctggcctttcagcttttcatgatacttttcaaccgctttgcgccagacaaatgtatagcggttagcatcagcttcaatcttagtaccatcgataaaagcagcaccttcattgattaagccttcatcttctaacaggttagtgaagtagataaagctctttttaatcagttcattggcatggctgcttgatctaaaattattgatagtatgatatgaaatcttttgctggtcagccaagatcatcattggcagattttcttccagcatcaactcaatctttctgccagaaaaaactcttctggagtaagcaaaaagcagtattttgagcatcatggctggatgataggctgggcggcccgttttagcagtcttgcctactaaaacatcttctggaattgaatctacaaaccagctgatgacattagccaaatgattggccggaatggcaaaatctagattaagtgttaaagcagtttgacctgtgatataattcttgtacatgttagtttccaccttttttattttgtgatgatttaataatatcaaggctggagctaaaagtatacaaaaagagcgttgaaacaaaaattcaacgttcttttttcatgatctgagacttagttttttcccagacactttttgctgaaaaactatataattaaagtaacaataaaatttacagcaaggcaaaaaggatgaaaaaacaaaataagactggctcaattggcgtagtgggtgccacggccatcggtgttggtggcatgatgggagcaggcctatatacattgctcggcttggccgccaactctgctggtgtttggctgccagtatcatttctaattggaggcattgtggccgcattttcagtttattcgtattcaaagttaggaatgaagtatccagatcgaggcggtgccgctaagtttttgctaaaagaattcggagatggcctgctagctggtgggatgaacgtcttccagtatatcggctggattatcgccatggcgttatatgcgaccggatttgcggaatatgcctgccaactattgggaaaatcaagctcaggctggctaggtaaggcaatcagtatcggaattgtcatcgtggttgtggcaattaatattatgggttcaaagcaagtggcacgtgcgcaaacggcaattattgcgtttgaattgttaatcttactgtcttttgtagcggtaggtttaactaagctgcatgtgccgacaattactagttcaaatagcggcaatattgtaggtatcctatctgctgcgggtttactttacgtaacttatgaaggttttggcgtagttactaacgctgcagggagtatggtaaatcctaaaaatcagttgccacaagcgctgttcttttcattagggatcgtcatggtgatttacattgtagctagtgtagtcgtggtgatgaccttaggcgttcaaggcgcagtagctaatcaaggccacgttttggcaacggctggtaagctagtattaggcaactggggtctgttcatcacttcactgattgtctgcatcttcgttgtgattttcccattatcagctgttggtgagatggccagcctagcctttttattggtgtatgccatggttaacttaggccacttgcgcattgcaggacaaactggggccaagcgctggattttgatttgctctgttgtattgaatctagctttgtttgctttgttgtttattcagacaattctcaaccacgaaactttaacttggatttcagtaattgctttgttaattattagttttttagttgaacttgcttggcgaaaaaagaataaacgcaacctgcattgattaggaaaaaaatagtaatttatgatacaaaaagtcgacttttgttccacttattgggtacaaaagtcggctttttgtttttttcgttgtcaaaacaatatctttaatattttaattcagatatactctctttgatcaagtttgaagtgagggaaaatgaatgaaaaagttattgatcggaagcgcagtcttagctgccttattaattaaagaaaatatcgcagtaaatgcggcaatagagcaaaacgaaacaacgcctaagattgcagttactgacaaaaaagagaagccaaaagaccagtctgataatagttttgcaggtcattatgaccaagagacaaattttattacctgggaaataaggctgaatcccaagaaagaaaaatatactggtgatttgaagttggaaaatttaattccagaaggcttagttctagatccagatacgattgaagtaattaagaatgataattttattcaaaattctagtttagttaaattgaagaaaaacaaattaacagctgaatttcctgctaagaagtattcagagagcacaattttgattaagtatcgaaccaaggtggaagcagagcctaatgagcctaattatcttcgggtgagtcagtcctttactttgggcgatgatcgagttcaagaatacgagcaagaaattaaatacgatcgaagtaataagaattttaacattgaagcgccacataaatctacgtttagagatgataatcaaatttcgttaattaaaaaatctaaaagtaatgaagaacgctctgaagattggcttaaacgtctagcagagctgattattaataaaaaagaaactacttcagataaaggaggtgaaaaagttcaaggacaggtcaaagatcaaaagcagcaagcttccccagaaaatacaaacctttcacgcactccaactgtcaaaggcttgactggttttgatactaaggctaacgaggtaaaatccacagctaaaatagattctgattcagtaaaaactactctagataaagacgagattaaggacaatgcaagtactatctcgcctaagtcgcaaaaacacgatactcatgtcacactccctaaaagtgacacatcagaaactaaggcaaaattacctaaagctggtgaaactgccggtgttatgctcagcgtattgggcataattttaataattgcagggtggacagttcgaacaaaattcttaaaataatacgcgtggtgctagttaaatcgttctagacaatatgccatattataagctaaaatagctatttctagccgttgttgaaaacctactaagctcctggctcgattattctcagcattgtaatagctaagcaaagaaaagtcgctttcgattgttcttctaattgccattaactgatgatcattatgctttttagcacccctcatgtttttacgatatggtgtccaaagcacgtatcccatacgctttagcttggctgctaagtcttttcctaaatagccttcatctcctaaaagataatggttaattggatgagcattgatcatcaattctaccgtctcttttgcatcatgtaccgacgccttagtaactgcgtagtcaagcagatagccatcatcactcactattgcgtggactttgaagccataatagtagatttttttcgtcgctttataaccaatatcggctatgccacggaagatcttaacgtgataattgcgaacaggctgacaaactggaatcggaaaactgtcgataatcaataattctccacctacctttacttcctgattccaaccctgacggatacaacgaattagaggcaagagcattcgagctcgacggttaaaacgagaatgagataagccaacgaagaatttacagaatcttcgttgagattcaattccaatttcagtttgccaaatgagcatcgctaagatagaactatcaggaagcttggtctgatcaacatttttacgatgtttaagtccatcaggcgcataaagcttatacagcgagcgacaaatcacatttaaccgattaaaactaacttgtaaatggtgagaaaaacgattaagcttgagatagttcaattagatcagactcttttctatttaaattacttacaacttgagtctagtctaattggacttttttattaactaactgaaacttgaaagctaagattaacgctccttccccgcgcctcttggctttttcttatcaaaaataaaaacgcaggctctctctgcgttatactttaagtgtcgacctaaaaagtaaaggagatcctgcgcaatgaacagtatagaacaaatcgacacagaaaatgatactaaatccttaatttcttcatttattaatctaattggtctagctaagttaactaaacaagtcaattttaagcgtaaatccaccgtttcattaaccatgattatctcttggctgatgtcagtacattttgctcggctttctttattcagagctaaggatgacaaacgtttttccgttagaactgctcgcaatgtacttaacgatggaagaatcaactggcaaaaactattatgcttgattgcagcccggctcattggctgcttaaaaccatttatcgataaaagacgccgacttgcttttatcgttgacgatacgctgatggctcggtctttttctaaaaagaccgaattgctagctaaagtctatgaccatgacaagcatgagtatttgaacggatatcgtggtttaactttaggctggagcgatggcaataccttcttgccggttaactttgccttgatgtcaaccaaaaccaagaaaaatatgattggagctgctcccattactgctgatgaacgttcaatttctggtaaaaggagaaatcaagctcagagaaagatgaatgatgtaactgtagagttgattagacaagccttacgattaggagtagaagctaaatacgtcttattcgattcttggttttcttctccaagaatgttttggattttaaagaagatcggtttagatggacttggcatgatcaagaagagttcaaagatttattacatttatcgccatcgccgctatagcgttaaagacttgtatgatcgttttgctgcttcaaacatccgtaaaaagaaacattatctttattcaagcatagttgatgctcaatatcatggacatagctttttattaaagctcgtctttgtctccaaccgtggaaacaagaacaagtatttggttttagctactactcagacaaagcttagccctgaagaaatcatccaactttatggtcgtagatggcaaattgaaacatattttaagacgtctaagcaatatcttgctttagataaatctcaagttcaaagctatgatggccaatgtggctatatcgcagttacagcaataacttatgatctattgacctggcaggaaagacaaaatacagatgataagacaatcggagatttattctatctaatgaacgaatccttacctgatattagattcgtagatgcattggtctacttaatttcagaattaaaagagcttaaacagaatagttttgaaaagatagatgaagtaatcaatgactttattaaccaactgccacgattcatacaaattgcactgaaacagatcatataaaaactaattacgtctaagaaagctcaatagtgacaggacttgagcttgattttggtgctttcaattttcagtgccctattttatgggtcataacctttataactataaaaatgaacataattcttctctaagtactatgactagttacataagagttatgtaatactggttataatagttataattaataccgtaacagttatgaaatttttacgtaactgttataactaagaattccttgaatatcgctatagcaacattttttgggacttcaatcaataatagtaaaagccatcagttatatacttgactaattagatgtggttacaacagttataaaaaaggttataacagtaattacaaatcaacttgtggcagttataatagaattattgttataagcatgtagaaaggtgcgctatattaacatggctgaagaaaacaaaaaaacaaaaaagtatgtaactttgtctgatttagctgatcaaattggaaataaccagattcaactagctacaagaaagaaaagaattagacaaattatagagagtaagaatatagagcatataactaataatcgcacttgggtaattgctgatgaaaatatagaagcaattaaaagtgaatatgctaaaagatggaaaaaagtagacgaagctagattcgatgctaaggcaaagaatgaagagcaacagtttaacaaaataaagatagatgaattaaagcgacagcttaaagaacagaagcaaatttttgatgaaaaagaagattattacaagtacgaattagatcgtattaatagaaagaatgatgctttggaagatgaattaattaatagtcattctgatctagcatcagcaatggaaaaaaatcaagatacacttcaaagacagcaagctttaatggcaagaaatgatcaacttcttactgatatttctaacttcaagtcagaatttacccaaactaataatcaatatcagcaagctcaaagacaaattgaaaatcataaacaagaaatgcaacaaaaggataaggaatttgctaaattaaaagaagaaaaagaaaatttacaaaaagaaaacgagagattaaagaatcgaaacctatttcaacgaatattcaataaataatagtcacgtcaaaaaaaagacgtgactattttactaaatgattgaatttatattcaatgattaaatcctattgtttcattaaataaatattgtttatatcaaaatgatagcattaatatatcatcttgatatatgttattcatctaaaatatagcccgaaatcacaaataataattaatgggtattgcaaaatgctatatttatgatatatttaatttgcaaagaaggtaaaatgctttaaacaaaaaggagtaaataaaaaatgatcagtaaaagcaaagcaaaaaaagaaatgtttgtatcatgtgatttagggtatggtgcaatcaaggcaaactttgatggtgtcaaagtaaagcaggattctgtttatgttccaatttatgagaatccaagttgggaagatggtatcgacttggaaaatcccgatgcagttgatgaagccattaagaatttgcttaataagttagatgtatcaattaatgatactcgctatttagttggtaagtctgcacttgataaattgggtcagactattacaatgcaaatggacgctccaaatggaaaagccgacagcaatagtgcaattattttgccagatgcttttattgccggaagggcaattcaagaagcctatgaaaattctagtgacgaatttgttatcggtgaacctattcaagtcaacgtacaaatggttacagcacttccaatttcagaggcgagaaatgaaaatggtgaagatgtaagaccagaatatgccgatagatttactaaaaaggttcatactgttactgtacatagcttaggcgaggatattgttgtaaggattaagtatgataacgttttagtattaaaagaaggacaaattgctactaattctgctattcaacatggcgatgctaagttagctaaaaaattaattgctcaacttaaaaaggattatccagatagagctgatgaagcagaagatttaattttaaaggctacagattatattagtattgatattggtcaaggcactaccgatatggctttgttctatgaaggagctgttaatgacaactcttactcaatcaatcaaggatttggaaatataattgaagatgtctttaagagatttagagaccctttgattaagacaaaggaagacttcgttagagtatggcatggtgaagccggtcttagagatttacaaactaagattgataatcaaatcaagcaggaatcaaatgacttgcaggctgatattcttactggtctaacaagtttacttagaaaaaatccagctacaaaagtaatttatgtttttggtggtggttctattccaatgatggaaagatacgatctaggtaagaagatcaaggatcgtatcaaacttcttcggacacctgctgtattagtatgggtaggtaaggattacgcccaagacttaaatgaaattgccttagataatattgcctcttatttaaaagagcaagcaaaataggacttggtgtaaatgaaggaaaagaagaaaactagtaattcaaataacactattcttagggttgaaaaagggtctttagaggacaaatggttaagtgcccaaagtaataaaacttttgcacttaagttactaataagaaatgcctatcgtcaatttggtaatattgatttgcaaaatgtagcgatagataatttcttgcaaagtccaatgatagaccttgctaaacaatcacgaaaagaaaatttcaaagaagaacaagcatcttcggataattctaatgctgaaaaaattgcttcttcgtttaaccatgaacataaagataaggctgataccaccaagtatcaacaagataatgatgatgtgttaaatgattatcaaagtgatgaatttggtgttcagtctaattcttctgataattctaatggtaatgaagaaaaagttctaaatgaaccttctcaagaagcaaaaaagaggaaaaagaagattattacttctaaaggaaagaaaagttctcaaagaaattattctagtgaagtaagaaatgcgcttccagatattatgaaaggcattgattaatcttctttacgtcaaaagtcttgatgtacaagtcaaggcttttttcttttctaaaagttaatactacttcttgtctttttatttatttgcctataaactaaaagtggcataaataatatgtttatgctgtgaagttattttgcattctttgctaatatgcaattaaaatatcgtataaaaagagtggagtttattactgatcatctccactccttttttattaaagatagctttaagactaatttaagatagcataaataaatatcgaacctatcatcaatattaatttatgctataagtttgatatatttttgatagcatataaaaaggggcgtttctttagaacgcccctttttattcttgtttcaattaatttgacgtatcgtaatcgtaagttacattgccatcagtggttgttccactgtcactatcactactatcatttccgtcactattatttgaattatccgaattactattatctgaattatttgaatttccgctgtcactatcattattagttacaacattttgattttgactggagttatcatcgttattttgagtagatgaatcagattggctattattgttgttattatcatcgtccttcttattttgatcatcgttgtctttatcatcactatctttatctttagtttttgatttcttgactttatcagtatcaatattatcaaaacttggtgcatgtcctttgatgtacaattctgtagtgattgcacgaccaattcgaactttttgagcaattacatcatctggtttagtccagtcagatgaggtcttattttccatcaagtaactcatcatctctttataaaagagttgagctgatcgttcgccagttttatctatggtaccttcgctgatcttatcgtaaccagtccaaacaccaatactgtattgcttagtatagccaacgaaccaactatcttttggagtattgcggtaacttggatagctggctaattctttatcagagtatttaacagtaccagttttacctgcttgatatacgtctgaaattttagcgtatttaccagacccctgtgtgataacgcccttaagcatgtcggtgatcatgtaagcagttgagtccttcatcactcttgtaccactatcatcataatttctagttaagccgtctggagcttcaactttatgaacgaatcttggtttgtgataaattccttctgttgcaaatgcaccaaaggcaccagccatttgaacggtagatgcattagcaccaatggctacagacaaaccttgtttaaggtcaacattaacgcccatttttttagcgaatttagcaccacgacctaaacctatttcttccaaagttcttacagcaggtacgtttcttgattgttcaagtgcatacctcatggtcatagcaccttgatagcgattatcccaatcgtacagttgaacgttagtccctttgtacgtatatggagtatcttgcactacttgtgcagttgaccagttcttatattcgattgctggtgcgtaatctaaaactggcttaattgaagaaccggttgatctacctgtttgaacagctctatcgtatccaagctgtacgttaggtaatttacgaccacctaagattgcaattatatgtccattcgaaggatcaacaacggttgaagcaatttgcatcttatcgttagtaaatggtacttccccatcattcgctaattcatagagcttgttttgaactttttgatcaatattaatagtgatctttagattgtctcggtaaggatcaaaaccgtcagctttaacttcgctgataacttccttaatataaggatcatcaattctacgttgtttgctgttagtagggtgcttagtctttaagcccttagtaatactttctttagtggcttgctcgtattgttgctgatttattttatcgtttgatagcatagcctttaacactaaatcacgtctctgcttagcaaatttaggataaatatatgggttgtagattgtcggtgcattaggcattccagccatcaaagctgtttgagctaaatctaaatcttgtaatgatttaccatagtaaaattccgaagcagtttgtaaaccatattggttatagttcatatatactttgttgacatagaactctaggatttgctcacgagaatattgttggctaatcttagcggatagccaagcttcttgaattttacgtttgaatgttctgtctttttcattagtggagaatacggaaagcttaacaagttgctgagtcaatgatgatccaccagccatattaccaccccgaacattgtttaccaaagcaccaacggtacggataggatcaacaccaaatttttcttggtaaaatcgtctatcttcgattgagattaaggcatcctttaattgttgcggtatatccttgctcttgacgtaggtacgtttgtcatcacccaaagagaagagcaatttaccgtcattagtataaagtgtagaacttccggcattttgtagttgtgattgactgatgttaggagccttgcttgcgtaataagcaaaaagaccaataccaataaatactaataaaacgcccgaagcgaatccccatttaataatttgaaaagcaatgtgtaaatacttgtttttaggctgtcgctttctggttaatctatgaggttcagaatgcaactttgcttgttgatctctcttagcaaaattagattgacgaggctcataattatttggattaggagtctcttgttcaccacttgaatacgcctcattatattcatcgtaatcatctttgcgcataatgactttgtttccttcctactatttgagaaatattttacgttttcaaaatagtaaatgcctaaaaacttctaaaacacaaaaatgaaaatcatattttgaaaatcaaagaaattgagctatatttttccagccaccattaaaatctttctcgaagattatttagtgggtggtggttaaaatccctaaagttgtaaaatttgcattacctgttgtcggtgtaatactgcttatatttattgccataataggtgcttttgcaggtaaccaagtgattcagcaacaacagcaggacaactgtgataccgaagaaactcaaacagcttctccggtatctggtggtaagaaaaacaaagttaaaggaataaaagttaaagaatataaaattaccaaccaaaaaacttatattgctcaaatcaaggagctaggtaaggcaatcggtaagaaaattggagttagaccagcgtgggtattcgctcaactttacgctgaatctggtcctgatggtagtcagccggttaaccgtaaagaccataacctttctggtatgagttggtctcccggatgtggttatgctaagggaacttcaagaggttccggtggtagtgaaggtggttggtatcgacactacaagaactttgcggaatttggtgccgattacgcaactactttaagaaatgactttgccaaaacaggtaagccacgtaatgttagtgactatgtaaataagttgaagaatgctagatatatggctaccagcgatattggaagatataaaaccaatatgcgcactgctttaaataacttctggggtggtaaatcaactttgtctggtgccgtacaggttgccgaagacgctggaaccgatactggtgaaaattgtggcagtaatggtggagatgacggtaacttcaaagcctctggcgacattcttaaggaagctaaaaagtggcttcataagttccactactcatacggacgttcagctaatgcacactggaagcatccaagtagtaatgatacgaccgactgttccggctttgtctggcttgtacttaaacgtgcaggatataaagttccaagctcaacatgggcaactccatcaatggaaagtgacgctaaaggttctcacaaatggctaaaacgaattagttctaaaagcgctggacccggtgatattatcattgtcaatcaaggtggcggtggtggtcaaagtggtcacacagctatcttgctagaaaagtacaaaggtaattccaccaaaatcatcgaagaaggtggggattcacgttatgatcgtgtaaacatccgtactattggttatgcttttggtccattattgcatggtggacgaactacgtttgcacgtcctcataagaagtagaatagataagaggtgaaaattatgaataattttgataaccaacaaaatcaaaatcgcaaccaaaattttgattttaagccttattcaaatcaaaatgagccggataatgaggaaaagaagcccaaaaatgataatttttttatcattattattggtggtgtagttttaatcttgcttttaggtgctgtctgtctagtatcactgaaacaaaagaacgatgaggctcaaagacaagctcaaagagcaagctcatcaaccgtacaaataaagaaattgcctcaagacagcgacagttctaataattcatcacaaaatatttctgctgatgacgctaaaaataatgtaaagtctgcctttaattttgcatttaagatcatgtcacaggttaatgcagtaagtggtgaagcgatggacttaacacaattaagcgatagtgatgctaaaacattgtctcgcctttttactacttcacaggttttgcaagattttaatgatgctactaattactctagtgataataatgacactatttacggagacgctggtacaggtgaaaagaaggttaaacatcctaaagtgggtaataaatattcagtgaaaagcacctcatttagcatcaactctgatagtggggataattacgtgtttaacgtaactatgaaataccagccaaaaggttttaaaacatcaagtattggtttggttgtttcggtttctaaatcgaccggtaaattaaccaatgttgaacagaaggtatagtaatgcagaaaaatagaggacaggaaaaaatcaatttaagcacaattatattggctacgtttgctgtagtaatagtaatccttattcttgcatcgacactaatttctctcaatttaaacaaggataatgaaaaattaagtgcagtacaagaaagcaacactacgttgcaacgtaggctagacactttagcccctaacaagattacattaccggcaggtcggttcccacttgaagctaatgaaaagctcttaagcaaggcatacactcaactaatggagtttgtttatacaggaaccaactctgataaaccttttaatgcaaataaaaatactttgattcagtatttcagcaaggatggttatgacaggcttaagaaagaaactttattgcaagatggaaataaagtgaaatcgttaagtaaagagcttaaaacttgtgaaattacattttctaactttaatttgaaagataaaaccgtagatttaacgatctattctgattattctcttgctaaaccatcatcaaacgtacgagagggtatttcagttatcacgttgacttatgattttaattctcttacagtatcaaactttgatatgaggagtacatcagtagaaaagcaggagattttctaaatgaacagattatttactgaaaagaaccgcaagctcttttactttgagtcagcgatcataatttttcttctgatattagtagtatttttaggcttaagccgtacaagagtgcagaaacagacttctgcaattaaaaagcagaatatagaactaaatcaaaaaatacaagctaagcagattaaattgaacaaagaagcatcagataaagctttgtctgatgccgaccgtgaagttaaggtaagtgctttgcaggttcagagtgaaaagagtgcaaaaaagttaatcaataagctatttccgatcttattgacttattctgatagtaagtcatatttgaagagaaaagatttagcagagccatatttatctgaatccgtattacatagtaaaaatatttttgcaacaagtgatacggacatggatcaacttgatgaaataggacttcattctaaatttaagtccgtaggttgttcaatgggtattatcaagggtaatcacattcctatgattattcttacttcatacgaaagctgggaaagtggattaagacatggtgttggtcaagacatttatgaagcttcttataatataagcaccggcaagctagatcatttggaaagaatcaataatctctattctggtcgtgtcaatgacgatgatgacgacaccaatgactaaagtaaaagaaaagccattcaagcaaaagcttgagtggcttttctaattatgagcaaaaatatctgtaaagcgaatcaaactgttaatagccagaatacagttaagcaagttagccatttcatagtgtttaatgttgttttcactgctgtccttgtcaatcattaattcattattaataagagttacgccatacttcttagcgatcttatcaagagcgccatataattcgggtgaaagagtgtctaaacggcactcttttcttttttcagatagcaaataaagagtatagccttcatcggtatatcttttttccttttttacatacgaaactctgatttcttctttattaagatcaagaaacttcatttcataggtagtcctatcatctgaatcaaaaatcctattaattagcagactgtcgctgttgctgtatacatccatttcttttacgtttgcctttcgatttcaattttaaccgccaaatatagctagttataagcaagtgtgagcgagttatcagattatagtcatgcttaatataatgaaagcctagcttggttcctacattatctggtgttaagaactggcttctggtttggtgccatgaaaaagtacgcttattgctcgtctgaatttttataacttttgctaaagtaagatgttcagcaccattttcgctgtaatcacggtagggaacaactaaatagttgcctacaagcgtatcccgatagtgatatggatttaagagtttttccaaatttaaggcattagtcagcttaggcggactccaaagccaattttttttgccagaaacgtattctacttttatccaatagtattttttctttttcatgggatcacctttctattagaaattataacctaataagatcatcagttcatttggctattcaaaataaaaaatgggatgaaaaagcgaaaaaagaaaaaactttttaaaaaaaattttgagttttttcaagaatgctgttatatcaacgttcctagcacctaaaaaaatggttcctaaatttgcacacatgcaaaaagcatgtattataagaatcagcaagtgagtgataagcaattaccactcatttgaaaaaatcaattattaaattttttagtaagggagacttatagaaatgagcaagaaaatttctttaaacaaagttttagcattgggcgcaactagcaccgcattatttagtggagcaatgatgatgaataacaacaaagttgaagcttcttcatcaagcatcgttttgttgaagttcaagcacaatgcttatagatacaacaagaatggtaagcgtattggtacaggttacatcactaaaggctctacctactactcaaagggtgcttacagaatccacggcaagaaatatcacaagctcgatacaaaaggcaacatctacattaaagatggtaacttatcaactcgccgtttaaccaatcaagtaactcttaagcacaacgcttacatttacaacattcacggcagacgtatcaacaaacaaaagttatacaaaggcgttagttacttcatctatggttcaagatacatcaatggtaagaaatattaccaaattggcgctcaagaatacatcaaggcttcaaatgcttccgctccattttcaacctacggtcaaagcagtaacaacgatgtagataacactactaataacagtaatgtttcaaacaacagcgcaactaatacttccactactactcaaaccaatacaaatactaatgtgggtagcaacacctcatcaaataattcaagcgtaatcaataaccaatctgcttcaaacaacagctcaagttccgctaataacaacattcaattaccaaacaactcatcacaaagtaataacactggtaatcaaggttcaaccactaagcccaatacaggtaacaacggtagtcaaagcactaagcctaataccggtaatcaaggttcaatcactaagccaaacacaggtaacaatggtagccaagtaactaaacctaatactggtaatcaaggtcaagaaaccaagccttcacaaccaacttacagtaagaactacgttaaattaccagcaggttaccttgaggctgtaaagaacgcaaattggaaaaagactagtgttccagattcattaattattaaaggtacagaagaaaatatttttcattctgaatctaaagcagatgatgaaatgaagattgatagtgctaatttaactccagatcaagcttacgaaatcaacaattttgcccttcgtttgattaataatgttcgtgcagaaaatggtcaaaaaccgtggtactactcaaacagatcatatgctattgctaaaagagttgcttacctttacgaacaagatcacatgggattatctacttggcatgatgataaggctttaaaccaagttgatagagaagcaggtattcacactgctgaattaatgggtggcgataatgtaaactataaagaagattacctaaacaacatgactgatttaaaacgtgccgtttacaatgatgtagttggaatgctctttagtacagttgaacttcgtcacgcccaaatcatgttgacttacaactctattgaccacccagaaactacttactttggcttttcagtctcatggcaagcacacaacaaagatggtcaccaagaacactctgatcactttattgcttattaatgagtaaaaagtcaaaatacatgtaatagatgttattctaaagaccgatgaaaaatcggtctttttttggaggaaaaaatggttatctatgcacttgcaataacaattatctttataatttttccagcgcttttaatactactaactgaaaattgaaagcaccaaaatcaagctcaagtcctgtcactattgagctttcttagacgtaattagtttttatatgatctgtttcagtgcaatttgtatgaatcgtggcagttggttaataaagtcattgattacttcatctatcttttcaaaactattctgtttaagctcttttaattctgaaattaagtagaccaatgcatctacgaatctaatatcaggtaaggattcgttcattagatagaataaatctccgattgtcttatcatctgtattttgtctttcctgccaggtcaatagatcataagttattgctgtaactgcgatatagccacattggccatcatagctttgaacttgagatttatctaaagcaagatattgcttagacgtcttaaaatatgtttcaatttgccatctacgaccataaagttggatgatttcttcagggctaagctttgtctgagtagtagctaaaaccaaatacttgttcttgtttccacggttggagacaaagacgagctttaataaaaagctatgtccatgatattgagcatcaactatgcttgaataaagataatgtttctttttacggatgtttgaagcagcaaaacgatcatacaagtctttaacgctatagcggcgatggcgataaatgtaataaatctttgaactcttcttgatcatgccaagtccatctaaaccgatcttctttaaaatccaaaacattcttggagaagaaaaccaagaatcgaataagacgtatttagcttctactcctaatcgtaaggcttgtctaatcaactctacagttacatcattcatctttctctgagcttgatttctccttttaccagaaattgaacgttcatcagcagtaatgggagcagctccaatcatatttttcttggttttggttgacatcaaggcaaagttaaccggcaagaaggtattgccatcgctccagcctaaagttaaaccacgatatccgttcaaatactcatgcttgtcatggtcatagactttagctagcaattcggtctttttagaaaaagaccgagccatcagcgtatcgtcaacgataaaagcaagtcggcgtcttttatcgataaatggttttaagcagccaatgagccgggctgcaatcaagcataatagtttttgccagttgattcttccatcgttaagtacattgcgagcagttctaacggaaaaacgtttgtcatccttagctctgaataaagaaagccgagcaaaatgtactgacatcagccaagagataatcatggttaatgaaacggtggatttacgcttaaaattgacttgtttagttaacttagctagaccaattagattaataaatgaagaaattaaggatttagtatcattttctgtgtcgatttgttctatactgttcattgcgcaggatctcctttactttttaggtcgacacttaaagtataacgcagagagagcctgcgtttttatttttgataagaaaaagccaagaggcgcggggaaggagcgttaatcttagctttcaagtttcagtaactaaaacgatttaactagcaccacgcgtaaaataatctatatttgtactaaaatacggattttcaatagccaaaatagactctttcacgtattatttagatagataaacttgtatcatgaaagagaaacaaacatgccgtacactatttcagaaattattgttttattttttacttattcagttatcggctggctttgggaaaccttttattgttcgatcaaagaccaccattatgattatcggggatttctgtttggtccttactgccccgtatatgggttcgccgttactacaattttaatttgtaccaaagacgtgcgagataacctgctccttttatttatagtagggactatcgttgccactattttcgaatttgtggctagttggctattagagacaatctttcacatgaagctttggaattattcaaaattatggggtaacattcaaggtcgagtggccccaatgatttcattattttggggcgttggtgtagttttattagtaaaatttattcagccaatcattcagaagctcattaataatgaagaaaaaataactcatggctggctagctgtgggtattaccattgttatgggtattgacttagtattaacagtaatcagtgtcgagagattccatactacaactaagatgtgggatgtgcatattaaccactttattgagcgagttagaactaaagtagaaagtcatatgcctgagaaaggaaaattgcgggttggtgattggcaccactcagtgatgcagcactatgatgaattacaaccgcaacgattaagctggaatcataagcgctacttgaagagctttccaaaattaaaagttactgatgctcctaagttcatggaaattaagaaagaagtcttgaagaaagaaagctaactaacataatcttattttgtgggattgaaaaaagtcggatgatcatattaggtcatccgactttttcttatccattaattctatttggttcacgttttttactttttatttcggtgtagttatctaaaacgttggcatagcgtccaagggtgaaaaggtaatcagataatcgattgaggtattttaatacgtcatctgataattcctgttcatttaaacttaatttgaccaatataatagcaacaccatcaactcctgaaactactgaagaagaacatctgacagtaaaagatcatgtgggttcatcaactttaagaagaggattaccacaaactggtgaaaagaaatctactttgaatgcaggctttgcccttgctggcataggcttggctttgcttgcagggatgttgtttgatcctaaaaagaagcactaatactgaataagaattaagttcgttaaagatcgaatcattttgggttcgatcttttttagtaacaaaatttaaaaaatcccaccttcgtgaataattgaatactttatatatttcaatcgtccactttagtgggattgtattaattcaggatgatctttttgaatttcctgtttttgaagggcagaccaagtccatggaagagttttttagtcgcctagaaactataggcaaggcttggcataaagcctatgataccattgattccgatacagatagagtcattaagagaactaaaatggatgctcgtactacgttagacctactagaacatctatcacctgtacagttctcttgaagagaaaaagaatatcagcacgtcaccagtatggttcttagactatgatcaaaaaatttattgtactgatgatgccatcattggtcagatgcttcaaaccattaatcatgacattacccgacgcagcagtcgtagcttattacactggaaaattcttaaacaaaattgttccagaaatttttatttttgatggatgttattttttgcttggttctaagcgattttatttatcaaagttaatagttctatgttatattataagtgttataataatgtaaaaattattaagcattgaaatatagtgcattatgatacgaggagaaagatcatgttagaaagagtcccaaaatatacactaagaaaactgtcagttggcttggcctcagtgatgattggatcaggaatactgatgaactctccaaaggtacttgctgatactattaacccaaatgaaggtactagtactgctgttcaaccttctagtcaagataaagataatagtgagccaagtactcaatctggtgctactcaagatgaaaacattgattctaacgcagctgttcaagagagaagcgacaactcagttactgaaccagcaaccacaactaatgctgaagaaaaagtagtggcaacaaatacccaagatactacgcaagataaagacaagcagacaaatgcgaatgaaactacgcaaaatactaccaatgtcgacaaaaaagatactgaagtaacgccgactaacgacgcaacaacagctacaccgaagacaaccgccaaggttaacgcaccggctgcaccaacagcaatgaaggcagcagctactgctgaaacaccagatccaacggttccagataactcagctaatactgctattatcaatgacaagaatagttttgaaaaaatttggcttgaaacatctactgcgcgggcccaggtctacactaccgttaagggaactgatcaaaaagtctatgtcagttcctatgcagaattcggtaagcgacttaattcattaatttttactaatcgctttgatccaaatagtctagaattacacattgaatatcaggtgttaaaggatagggttcaaaatttcattgtaaattggggagactggctccgactagataccagtagaattggtaaagatggtctaactttcactacagatacaggtgaaaaagtagcctatacgttaacaccaggatgggggggaagtacaaaacctatgatgaatggcttagtgaaggccaagatatgagtaagataaatgctcttaaaattggcaacaatttaaaggccgggactaacttcgtattaaccgttcccctaaaatatattggtagaactgatggcacaaagcaatttaacaatgttcaagttgtagattacgggcagccaaatgctaatatggtgttcgattttattgaattacatccagagcaaatcgatactccagaagctccaactactgataaagagtcagttactaccggtatctataacaatccgttagctactgctacagactggtataaaacggagcatggtgaatatgttgcatactatacagctaaagggaaagatggtaagacctatgtaactggatatgtggctgccaatggtaagtctgagtcgattatcaatgttgatcagattgatctaaataccttggaataccatatgatttaccgtaatggtgacgaagaagtagcggccggtatttcagcaagctttgctgatggtaagactctagtggttgatgctagtcgtataggtgctgatggtatccgtttgaagagtcaacagggttggtcttataacaacgggggttatagagagaatactagtgggagactctattatagttgggaagattttcttaagaaccataacggatcggtagataacctcgttggcatcaatatgaatgcatccgctttcaagccgggcgatacaattgaagtagttgttcctgttaggtatattgggaaactttctgatcaagttcaatccttagaatttaaatctgaagctagaaaagatgtttcggttaaactctacttcacaactgtgcgcaaggacttaagccaggttaagcaggtagtcttgcttccgactgagttcatgggagaacaacctggtcaatcaaactggaagctggttaaggaaattgaaaaagatatgccaaatgggtgggaggccattaaaattagtaacttcccaacctataagggatcattcaatatggattcactaccaaaaggggacttaccatcggttgtttatggctctgcgcaatactttgttgacctccaagaaattcagaaaatttttgctaaccatggttacacggtcaagtatgctaacaacaacggtaaagctcaggaaatgccattctatggatacgttaccctgccactggcccttattgatggtggtggtaaacctgttgccccatctatctggacaatccaagttcaagctgtgcctgctattattttaaataaagatcaacactatgtggcagatccgaatgctaagccatgggacaccacttcaatgattgatgagatttatgctgctgatgacgcaggacagcggaagacgcgcgatcaactagaaaagttgccaaagacggacgtggatattagttatgaataccaagctccaggggctgctacagctgctccggttgataaggtcgacttgactaaggcgggggtatacactgtcacttacagtcatacttatgctgatgggcgagtagttaaggatagtcgcaaggtttatgttgatgatgttaagcaagaaaccaaggacattactcgaacaattattgtccacgagccaaacggaactgaccaaacagttatccaaaaagcaacattgacacggaaagtaattcttgatgcaactactggggaaatcaaatctgtgggtggatggtctactgctaagtgggaaagatactcagctccagaatttaaaggttacactccagccccggctcaaattgatgaaactgctgtgaacaaggacactcaggatacaactgttgagattagctatacagctaatgagatcacaaagccagaaaccaaggacattactcgaacaattattgtccacgagccaaacggaactgaccaaaaagttatccaaaaagcaacattgacacgggaagtgattctttatgcacctactgggaaaatcaaatctgtgggtgaatggtctactgctaagtgggaaagatactcagctccagaatttgaagattacactccagccccagctcaaattgatgaaactgctgtgaacaaggacactcaggatacaactgttgagattagctatacagctaatgagatcacaaagccagaaaccaaggacattactcgaacaattattgtccacacgccaagcggaactgaccaaaaagttatccaaaaagcaacattgacacgggaagtgattctttatgcacctactgggaaaatcaaatctgtgggtgaatggtctactgctaagtgggaaagatactcagctccagaatttaaaggttacactccagccccagctcaaattgatgaaactactgtgaacgagaacactcaggatacaactgttgagattagctatacagctaatgagaccccagagcaaccagataacagcaaggacaaaggtaataatgacaacaatggtggtaacaattcagatgcgattgtgccaataaatcctagtgacaataactcaaataattcaaataatgcaccaactgacaataagaagactgatgacaccaagaaagataatactggcaagaagattacaaaggagactcctaagaaggtaaagaataataagtctaacaagaccaaatcaacgactacttctaaatctaaccagtcttcaaaggctaagcgaaccactaaatctggtacgattagtcctaaggcagtcgctttagctaatactactgctggtctagctacttcagctaaggcaaatatggaaaacggtattgccaagaacaacagccaaaattctcaaactttgccacagactggtgaaaatgaaagtaaggtagcatttgccgttgccgggttgttagcagctgctttgggcatttttggtatagctattaatcataaaaaagaaaattaattagctaagttgaataaatcatacaaaaagacgcatagaatagcaatgtcattaagttaagacattgacgaaaatcagactttatgaaccgaattattttggctctttgtcaaacaccctaaagtataaaggtagatagaaacatgacgatgtttttatctaccttttttcttatacttagattgagcttgcggttgaacccttcaaggcagccgttagaataaggcagttttgctccattaagcacagcttttaggttatgtttaaaggtcaatagtgttttgtgcattaaagtcccaatttgatcttggcagttgattaataagttgagctcatgagtattgcccgtttcaacggcttgaataaagctttgcatcaggttatatgaattctctaaggtagtgctggtattgatgccttctgtaactacttgtgcttgagttaagcagtctttgtagtgccagttatagtgaggatgaactttttcaagttcatcaaacttcttcaagtataatttccaaggagacttaagcagctgatattgccgcgatcttttatcaaaggtcttcatgacttggaccctcagcgagttgaatgagcgcgtaagcatttgaatcatgtgaaaacgatcaatgacaatctgtgcattaggaaaacaagctctaacgatatcttgatagtaaaaattaagatccatcgtgaccgttttaacgttagctctagcttggagcgagaaacgaccaaaatacttaagcagcgtcttcttgtagcgagttctaagaatctgaacgacttgatgattatcaccatccaggcagataaagtgcagctggcggtaactcatcaaaagctaaatgagctggcaaatattcgtagctgtcaataaaccggtgtgaacagttgcccagtactctttgaacagtattaattgaaatattgttttctctggcaatgctggtcatagatcgatcttcagttaaagctgacaacactttaagcttagaggcattagaaatagaacagtatttaccaattcagactgagccatagatcagcgctcacaagtgcgacatttaactcgttgcttagctaatcttataatgaccggtaagcttgcattagctgtcggatagtgaatgttggtaatcaaatggccattatgtaagagatctagggagccgcagaaaggacaagcaggttgaagcaattcagcttcatagattttatgcttttgcagtttgatcgatttatagaaatcacctttatttataagaatttgtgtggaaacgatttttattgaagaggactatgtcctcttttttgcaataaaaaatcctgttaacagcttatcatatagataagtcatcaacaggaaaaattatagagccaatattttgagattaattgataggggttgaaaagtaaattttatttgttatagaaaatatagaaaaaggattgttcaagaaattattttacgaaacctgcagtgaaccaagtgttggcactaggcttaagtgaccagccagtgaccttcttgttaacagcagtgattgagtattggttggtagttggcacaacgtatgcttcatcatacatccacttttgccacttcttgaaggcattagcacggtaagtaggattgaaggccttctctgagtcgatatcagccaaaagcttagtttgcttaggtgaaacgaaacgagcaaagttgtatggtgcagcttcattgtaaaggtcgttaggggatggttcacttgaaagtgaccaaccaccttcgaagacgtcgattcttggatcgtcagattgaacagcttgtacccagttgttgaattccattggacggccgccgacaaatttaacatccaaaccaactttcttccattgttggatgtagtttctccaaacaggttcagcggtagttgagttgtttctaacagccaagttaattactaacttcttgccgttaggttgaactctgtattcacccttcttcttgtagccggctttatccaataattcgttagccttcttcaagttgtatgggtaacccttgattgacttgtcagtataatcaccaaattgttcagggatcaaagtgttaacgcggaaggccaagccgtggtagtaacgtttagcgactgcatcaacgttcattgcataagccattgccttacgcaatgatggattgtccatcttggagttcttgttttcaacgttcttgccagacttcttatcccatttacctaccttaaagcctaagtagttgtaggataggggaaccttaccaatgaagttggtatcagtagcgttcttaacatcatcccattgggtgttaactacgccagctacgtcgaacttgtgactcttgatggcttgagtaactgagttggtaccgatgactgtcatggataccttttccaagtttggtgtaccacgccagtaatgcgggttacgttcccaagtgacagattgaccacgaacaagcttgcttacgcggaatgggccgtagaagagtggttgttttctaaccttgtcactagacatcaacttggagaatggtacgtcctttaagtaatggtaaggttcagcgtattcctagaagtaaccgttacctgattgaagcataccaggcttcatttgtttaaagtgaattacgaccttgcggccatcttcgccatcaggcatctcaataccagaaatcttcttgctcttgccttcgtgatattctgctaaaccaacaatgtcggcaagagaatcggtataacgttgtgacttggagtttttattagcgataatttcataagcgtattccacgtctttagcattaacttgcttgccgtctgaccacttaacacccttcttaacctcgatagttacggtcttggctttacggtcaagcttaaaggtagcagcacctttattgttaatcttgtattgatcgttgactgagaataacccttcttgtcctggctctgcaacttcactgtcagtggcagtatcagataattctggcaagaaaataccagtgaagggactatcagattcgatagcataatttaaagtgccaccttttttaacacttttcacaggaacagtttgactgaatttgtgatgtgtttcatctgcattattattttttgaatttttattattaccacaggcaaccaaacttaaagctgccccagaaacaagtgctaatgcaccaaaatatcgttttgctttactcattcaaaaagcacctccaaataaattaaaaatatttaagttttattctatgatattaaaatgaaaaaaacaatagaaagatgaataaaaatgtgaaaaatattatttttaaattatttttgaagctaagattagttttctttcttggctaattaggcatagaataaggaaataacagctttttatgttggaggaaaatatggatacagcctggcaaaaatttaaaaataatattccattacgtcgatttgtggtactgctattaattattgcctgcctttatgaaatacgagcaatgatgaacacagtattattaacttttatttttacttatgtgatcgtgcatttaattcatctagtgcagcggtattttcctaaaataccaacaggcctaattgttgcggtaacatatctaattatcttggcgctactttatttcgtggttaccatttatttgcccatgttagttggccaaatatctaaaatggtaaagtcagtgatggcgttttatgaatcaaatgaatcatcgcgcttagccagccatgtaacgcgttatatcagtaaaggtgagattgttacgcaggcaaaacgagttgggacttttgctctgcatacggtgaccaattttggtagtttaacaattgctacctttatgtcattgattttgagtttcttctatacgattgaattagatagaatgattgaattttcaaagttatttgttaaaagtggttactttaaatggctttttgaggatattcgctattttggtaaaaagtttaccaatacttttggtgtcgttttagaggcgcaattctttattgccatttgtaatacggccttgacgatgattagtctggcatttatgcatatgccgcaaattattgccttaggcttaatggtctttattttaagtttagtgccagtagctggtgtgatcatttctttaattccattaagtattatcggctattctgttggtggcattcgttatgtgatttatatcttcattatgatcatgattattcatgcaattgaggcctatgtgttgaatcccaaatttatggctagcaagactgaattaccaattttctatacttttttagttttgttagtagctgaacacttctggggtacttggggcttgattgttggtgtaccgatcttcactttcttgcttgatgtcttagggattaaatcggcgaagaaaagtaaaaagaaagcgaataaataatgagagtacttttgacaggtgatagcattattgcacgccaggaaggaaaaaatgaaccgcatcttaattggaatttgcaccaattattgccagatattgaaatagaaaataccgctgtttcggggattaactccggggccttttttgccaaattaaatgaattagtactaagcgtaaagcagtgcgataatttggtgatcttgctgggaaccaatgatttggctatgcacaaacaagtgccagcaaggcaatttaagcaaaatatggaaattatttcctcggcaataatttgtcaatattacccaccacatgttctgcttgtttcgccgccagctgttgatgaagctaagcaacgtgtacggaataatacgttagtagcggaatatgctcagatcgtgaaagaagtagcacatgagtatcattttcgttatgcagatctggcacaagctatgcgggatactggcgatttaagcgagatttgtcaaggagtaaaaaacgatggacttcattttggtgatcgtggctatgagattttaggaaaactaattgctgaaaatttgaaacaaatgtaaaagtgtctgggaaaaaactagcttccagatgaataaaaacgatcaagatttccttttttaagaatcttgatcgtttttttgttctctttaaaatttttaacaataaaaatcggcccttcagccaccttctttgacaatatttgttcaaattcatcatcataaaggcaattccgatatcggtttcgaccttctctttacctcgcaggtgcgttctgcgcatgccaaatacgttcttcaaatgtccgaaaactggctctacatcatattttctcatgccatagatgtgtctgccttcttcgctttggagaacttcttttgctttttcttttaaatattgccagttaggattatagcgaacttggcgctggcggccgctagctgttttagccaattgttccaattctggcgttagctggaactcgtctgcctcataaaccttaaaatcacggacctgaccagtagaacgatccttgcgctggctgtaatatttgaaattgaatctgacgccatgatgatcaatgtaataatcatctttttcattgtagtaccagttgattagcttagttggatcattcttatactttttggtctgttctttttcatacatagtgtagggaataaagtacttcttgtctggatatttttcctccagcatcgaataattgtattcactgccatagccagcatcggcgacgattttgtcaaacttgtccaacacggtcatttgatccaaaaccggctccaaagttttgaaatctgtcggattaggaaagatggcataatcaactacatattgatcggtcgtgactgcttgaatattgtagccaggctttaattgaccatttttcatgtggtcttccttcatatgcataaaggtggcgtcatgatctgttttggaataactgttgcgtccggcaaagatctcttcggcttcttcatatttttgcattcttggcacataatcttttcttagccggtgcagaatcttttttagtccacgtcgcttggcttttcgaggtgaaccgccaggaatggctttgttttcctgctcaatctctttagtcagcttgttaatttctgcttcagtttcttgagctaattcctttagcccctgactagtttgaactttttctttttccatttctttgactacttctttagtaatcaattcatcataaagttcaactgcctggcctttcagcttttcatgatacttttcaaccgctttgcgccagacaaatgtatagcggttagcatcagcttcaatcttagtaccatcgataaaagcagcaccttcattgattaagccttcatcttctaacaggttagtgaagtagataaagctctttttaatcagttcattggcatggctgcttgatctaaaattattgatagtatgatatgaaatcttttgctggtcagccaagatcatcattggcagattttcttccagcatcaactcaatctttctgccagaaaaaactcttctggagtaagcaaaaagcagtattttgagcatcatggctggatgataggctgggcggcccgttttagcagtcttgcctactaaaacatcttctggaattgaatctacaaaccagctgatgacattagccaaatgattggccggaatggcaaaatctagattaagtgttaaagcagtttgacctgtgatataattcttgtacatgttagtttccaccttttttattttgtgatgatttaataatatcaaggctggagctaaaagtatacaaaaagagcgttgaaacaaaaattcaacgttcttttttcatgatctgagacttagttttttcccagacacttatttttcgctattttaatgttgcccaaagcaagcttccagctagcgcaatggccaagaacggaatgagcaaataggcaaaaaagaaaaacataattcctacgactagtaaaaagccgataattttaatgaggccaattcctaatttaaagaatagccagagtaagagtaatgttaataataaagaaagcatattaatacctccataaatctatgagagtattttactaccaaattggacgaatagaatagtaggaagattaatgctttagaaaaatttagttaccggtaacaagataaattatattgaaagctctttctgtaaccgctatatttcaactattgaaagcgatttaagaaacgagaggaaaaataaatggaggagaaaaaaactgggttacctacgctagctagtacgacaatttggatgattagtttggggtatttgggtgtgcaaatcgcctttactttggaaacatcacagatgagtcgaatcttccaaacattgggtgctgatccgacaaaattaggctggttctttattttaccgccgttagctggattggtagtgcaacctggaattggatcattatccgatcgaacttggattcctaagattggacggcgtttgccatatttattagtcggtatgatctttgccgtaattactatgattttgttaccaaatgttggtagttttggtctaggctatggttcaattgaggctctaatatttggtgctgttgcaatcgcgatattagacgtggcatcgaacatggcaatgcaaccatttaaaatgatgattggtgacatggtcaatgatgaacaaaagtcatatgcctatgggattcaaagcatgttgtccaactttggtgctgttattgccgcatttttcccgttcttattaactagtttgggtgttgctaatactgctaaaaagggtgtggtaccacaatcagtaattatttcattttatgttggtgctgccgttttagtcattacatcattgttcacgatattcagagtacatgaatatgatccagaaacctacgctcgttatcatggaattaaagaatctgataatcaagaaggcggtggttggattgaactgcttaagaaggcgccaaaagtcttctggcaagtgtcattagttcagttcttctgctggatttctttccaatatttatcaacttacgctactggtgctattgcacaaaatgtttggaatacgaccaatgcctcctctgcaggctaccagattgctggtaactggtttggtgttttaactgctgtacaatcaattgcggcagtagtttggtcatatgttttagcgaaggttccaaataatcaccacaagctaggttacggtatcagtttgctactaggtggagtaggatatacttcaatcttcttgattcattctcaggggtttttaattctatccttcattttaattggtatcagttgggctggtatgaatacttatccattgacgatggtatctaatgctttatcaggtaaacacatgggaacatacttaggattgttcaattgctcaatctgcttacctcaaattgtagcatcactgctcagcttcatgattttcccaatggtgggtaactccatgccagcaatgatgttgattactggtatttcaggcttcttaggcgctttatcagttttagcaattaaggaaacctacgtaaaatagcataatttttccgataaaaaaaacactgcgtgcattgtcaatgtcattaagttaagctattgacattggagaaaaaacaattaaagcatcatttggctttagatagccaatttgatgcttttttgtgtacgccaaataagcgtagtttgtatttcttttttattaggccacgcgatacatgtaatatactgcagacttggcttttaaatttcgtttgtcttttcgcctttatttttgcaaaaaaaagaatcgaatccaaatgattcaattcctaaaaagatcagttttcaaaagtcaatagcttaacttaatgacattgcattttgaataactgcggagatttttggtataagtcccttaacgatgacttcggctcttattataataagaaaatccgcaaattcacagtgttcatattatagctgtcgttcactcttaacttataatcctaaaataacgttctaatctgtgaagtattgcagaatatcctcctcagttaggcgttttttgtcgtcgcctttgacatcaaaaacgattctaccattgtttaaaatgatagtgcggtttccgtatttgattgcgtcttttaattggtgagtgatcatgacacaggttaaatgctcttcttgcacaactttatcagttagttcaagcaattcgcggctagtatttggatctaacgccgcagtatgctcatctagtaagagtaaatcagggcgcttaattgtcgccattaaaaaacttaatgtttgtcgctgaccaccagaaagattacccacaaaagtatttaagcgttcatttaacccattagggagttgggccgcctggcgtttaaattcttgcatatgtttatctaggcctcttaaacgcagaccgcggtgttcacctcgtttggttgcaagtaataggttttctgcaacagtcattcgcggagctgtacccattttaggatcttggaatacttgggcaatatatttagcgcgttttacttcagaaagattggttaaatcttggtctttgagcagaatttttccgctagtaggaaaaatagagccattgataatatttagtagcgttgatttaccagcaccgttggttcctaaaagagtaacaaaatctccatcttcaagttttaaattgatgtttttgaggatttgcttttcctcattggtaccagcattaacagtagtagtaatattttgtaaatcaagaatagtactcatggtttttcaacgcctttctttaataacttacgagtgcggaatttttgttcaaataatggaagcatcatgcaaatagcaagaataatagcggaaatcaatttaaagtcgttggtactaaagccaagttggaggactaggagtaagataaggcgataaataatactgccgataacaactgctaccaagcgggcggttaaacttaaattaccataaacgacttcaccaataatgatggcagctagtccgataaccatagtaccaatacccatattaacgtcagcgtaaccaccgttttgggctaataatccaccagctaagccgatcaagccattagaaagcattagacctaagattttcatattatcggtattgatcccaagagattgggccattttttcgttgtcaccagtggcaataaaggcttgaccaagatcagtatcaaggaaaactgctagcaaaacgatgacgataatggcaatgatcaaaccaacaacaatagtaggaaaattgatcggtaatttttgtaaaagctgaccgtttagtaaagtatttttgttaagtaaaccaacattagccttgcctagaattctaagattaactgagtagacgccagtcatcgttaaaataccagctaaaagaacaggaatttttcctttagtatatagtaagccggttactaagccagtgaccatgccagcgaagaaggaaagaatggtagctgctaaaggattgacgccatgaactaaagcactaacacaaattgcggcaccgaaggggaaggttccttcaacagtcatgtctgggaaatttaaaattctaaaagttaggtagaggcctaaggctaaaataccccagagtaagccttggccaatagaagaagtaattaagctcatttgataattcgtcctttcttttgggcagcttgaattacactgttaggaatagtgatgtttaattcatgtgctgctttttcattgattactgtttcataatgggttacgcgtctgactggaagagcagcagggtttttaccatgtaaaatttgtcctgccatttgtccagttaagattcccatgtcgaattgactgacacacctggtagcgagaccaccacttttaaccatagtatcggcagcaggaaaaactgggatcttggcactgttagtagcctttaataaggtggcaattccactagctacagtattgtcggttgggacataaactgcttgaaccttgcctaccatggtttgggcaacttgttcgatatcattggttgaagtgatagtgtaagggataactttaagtcctgttgcttcagctagtcgtctgaattcacggtactctgatgctgatgaatcatcacttgaggtgtaaatgacaccgatgtttttggctttaggtagaatttcttgcattaaggccagctggctggcgattggctggcggtcctggacaccggtaattttaccgccgggatgcgctaggctttttactaaatgggccccaagaggatcgctgaccgcgcccataactacagggatgttgccagaagtattagctagagattggacagcaggagtggcaattccaatagttacagtcgcattttcctggctaaaacgatcgctcattgatttcagattactttgatcaccttgggcattttgaaaatcaattttaagattttttcctttgacatagccttcatctttgagaccctgaataattcctcgatgaatctgatctagagcggggtggctcattgtttgcaagataccgacagttggcgttttcttttccgcatttttcttatttacttcactgacaaatgcaactgccagaaaagcaaaaagagcaataattgttccgattaaccttttcattctttttctccttcaaacaaaaaaggcacttccttttttcgggaaatgcctaaaacaaaacccgcacgttattttccgtgcgagcaatatttcttgaagattttaccagcacagatacgatcttaatgagtcgcatctgtacttcacgaacagaaacaactctagtgctggaattgccaacgattgattgctgtaaatttaatcatgataaaatcttcctttcgttcaaatttgttagctaaattttaagtaattatgagaaagatgtcaaatgattttttgttagatttatttagttttgaataatttttaaaatgctataataattattccggcaaccatcataaaaagaagggaggaattctcttgcgctatcaacaaataatttttgatgtagatgacacaattatcgattttgcggcaactgaagattttgctttacatagcttgtttaacgctcatcactggcctttatctgcggaattgcagcggcagtatcattcttataatcaaggactttggcgccaacttgaacaaggtgaactaacttatgaagagttaagtgaaatgacttttcatgattttattttggatcattttggcattgagattgatggcaagaaggcaatggatgaatatcgttcatactttggtgaagcacaccaattattgcctggggttgaagatacgttgaaatttgctaaaaagcagggctataagctgaccgttttgagcaatggtgaaaaatttatgcaaaatcaccggttggagcttgctggggtgaaaaaatattttgacttaattgttacgtcagaggaagcccattattctaagcctaatcttcatgcctttgactatttcttcagtcgaactgagatcggtcctagtgagacagtcttttttggggacggcctacaatctgatattttaggtgcagaaaaatatggctttgatagtatttggtacaatcatcgccatcgtaaaaataccttgcatttgcatcctaagtttgtagtagaaacttatccagaattggttaaattaatgcagaatgattttgagaagaagtactaatcattatactttttgctcttcaagaagatgccccaaccaatagttaataagctgacaaaaattattaaaatccaaaagccgttttcattttctttacctggtaagccgccgacattcatgccccaaatgccactgattaaagcgggaagagcaattaccagggcagctgaatctagatatttcattaaatgatttaggtgactgtccatcatggcggtaaagaggccgctaatggaattgagcaagtcagtgtaaacgtgaatcattttggtaattcgtttttgcttggtcatgatacttttgacgcgggcttgatttgctagcttgttttctactaaataattaccaaattcttctagactaggtgtttgatcatctaaggtatgctttaagtaaactagctggcgagttaaatctgttactttttttaattctttggtcttagttgttcttcttgcagcttgatctaaatggtcaattttttgtttaattgttactaattctgcatgaagatgcttgatttggatacacaggctttgaaaaattgtttcaataatattttcttgcggttttaattctgaaagacttcttgttgtgccaataaagagatgattttggtcaaaaattgtaaaaattggaattagctcttgttcaattggcaagtcattacttaatagatcgaaactcactaataagtgaccattttttagtttattagaatcaatagggataaaacgagcaacctcaatcgaggaattagggtaagtgaaaattgtaggatctagatcccattttttgattaaatgatcgatatcgttttgcgtcaattgatcttttaaaattatattctgactattagtaagcatatttgttcacctctgtttcttttttagtttaagattaacatgtaatgttttttagactgaattaagttgacttgaaaatatgtttttttaaaaaatatagaaaggtgagaatatggaattacattcacttactgatacttatactttgaacaacggcgtaaaaattcctgtaattggtttcggtacttggcaaacaccaagtggagaagttgcaagagaatctgttgaagccgcacttgaggcgggataccgtcacatagatactgctgcagcttacggcaatgaagaaagtgttggcgaagcaattaaacgtagtggcgttaaccgccatgaattatttgtaactactaaattgtggaattccgatcatggttatgacaagactaaaaaggcaattgatactagtctagaaaaattagatttagactatcttgatctttacttaatccattggcctaatcctgtagctatgcgtgacaactgggcagagcttaacgctgaaagttggcaggcgatggaagaagcagtgaaggctggcaagattcgcgcaattggtgtatccaactttagaaagcatcacctggatgaattaatgaagactgctgaaattaagccggtagttaaccaaagttacttgaatccgagtgatttgcaaccggaagtaacggccgcaagcaaggaatatgatttgcttaatgaggcttacagtcctttgggtacaggtggtttattaggcaatgaggtagttaatgcagttgctgaaaactatggtaaatcaccagctcaaatcttgattcgctggtccttacaacatggctttttgccattgccgaagtcagttcatcctaagtatattgcggctaatggtgatgtctttgactttgagattagtccagaagacatgaagaagttagatggtttacgtggggcaagtaagttggctaatgatccggatgaggttaacttttaatttaatttggaataaagaaaattgaattatcacaagaagtatcttatttttgaagtaagatacttttttattaggtgagacaatgaagaaaattacaacaggaattgtagctcacgttgacgcgggcaaaacgactctttctgaggctctgctgtacaaggcaggaaatttgcggacgctaggaagagtagacaatggggatgcttttttagatacagatcaattggagaaaaaacgtggcattaccattttttctcatgaagctaaattaacgactgatgatttagaaattacgttgttggacacaccgggacacgttgatttcagtgcacaaacagaagaaacgctgagtgtacttgattatgctatcttggttatttcaattacagatggtgtaactagttatactcgcactttgtggcatttgctcaagcgatatcaggtaccagtttttatttttgtgaataaggttgatgcgataggcgctgatcgagggatggcgttggttgatattcaaaagaacttaagtgagagttgcgttgatttttcgaagattgatgatgaattttatgaaaatgtggctgccacaggtgatgccttgcttgagaagtatttggatagtggtgccatttatgatcaggacgtgcagaatgcaattgtgcagcggaaagtttttccaatttattttggttctgcgttgaaattaacaggaattacggaatttttggctggttttagtaaatggactaaggaaaaggaattctctgataagtttgcggcacgatgttttaagatctcacatgatgctaagggtgaacgcttaacttggttgcgaattttgggtggcagcttaaaggccaagactgagctagctggtgagaaaattaatcagttgcgtagttataatggtgaaaaatttgcgactattacagaagcagctgctggagaaattgttgctgcaacaggattgactaagacgtatccaggacaaggattcggcgtgggggatgcaccaactgcactgcttaagccagttttgacctataaagttaatccccaggataatgatcttcacgcttgcttaaaagctctgcaaaccttggaagatgaagatccacagctgcatgtgacttggtccgaacatttgcaagaaatccacgtgcaagtgatgggaaagattcaattagaaattttagaacagttaatgcaagaacgttttggtttgaatattgtttttgaacagggaagtattctttatcaagaaacaatcactaaaccaattgaagcagtaggccactttgaaccgctacgtcactacgcggaagttcatcttttactggagccactgccacgtaatagcggtattgtttttgaaaataaatgcagtttagaagttttgactaaaaattggcaacatcaaatcatgacggcattgaagtctaaagaacatcttggtgttttgacagcttcgccgattacagatatgaagattaccttgatcggtggtaaaggctcaattgcacattcggttggtggcgatttccgtgaagcaacttatcgtgcagtgcggcaaggtttaatggaagaaaagatacgccaacaaactattttgctcgaaccgtggtatgattttcgcttagaaataggaaaagatcaggtagggcgtgctttaaatgatattcagcgcatgaatggaaaatttagtacgcctgaaaatattggtgaacgaacagtcatatccggttctgcaccggtagctgaaatgcaagattatgcgacagaagtgcgcaattatacgcatggtgaaggtaatcttgaatgcgtagtcagtggctatttgccttgtcacaatgcggcagaaattattgaggaaaagaattatgatcccgtttctgatctggagaatacgcctaactctgtcttttgttcacatggtgcaggtcacaccgtcacttgggataaggtgccagagactgcacaatatccttatacttatccattagattagcatgataccatgaattgtttatcttgttacatgtgaaacattaaaaatgcggcatagtgcttttcttattaaaaagtgcaacttgaaataagcgaaatatttgactagttatgaaagaaatttcattttattagcaaaatactgctagaaaatcgcttgcatagtaagataaaggtacgatagaaaggtgataaaacatgacacaaataccttttaaagctgtagcggttgatctagatggcacttttttgaccgaaaaaaagacttttgatcatgcgctatttgcaaaagttttacgaaaattgcaagctaatcaaataccgtttatctgtgcaacagggaaccaactaattcgttcgcatgaatattttgacgagtttactaatgaagtagattatgtgtctgaaaatggggcaattctagaagccgatggcaaagtatttaagcggattgcgattgactatgatactgcacaaaaattgttacattttattcaaacagaataccctgaagcaatcattatggttagcgcacagcatcattgctatattttgacgagtatggatcaagcggataaagacgacattagaatttattatcgtgatgttcaggaaatcgatcagtttactgacattgatccagccgatgcgatcttgaaggtttgtctgacagctgatgatgaactggcgcaggtgattcaggatcggtttaatgaaaaatatggtgactgtattcgcggcactagcagtggtaatatgacaatcgacttggtgcataaaggcattaataaggccaagggagtagacgatatgcttaagcattatggcattgcgcaaaaagatttgattgcctttggcgatggcgaaaatgatattgatatgcttaaggcatgtggctatagctatgcgatgaaaaacgccaatgcgaaggctaaggcggtagcaaagtatgaggcgccaacgaatgatgaaaatggtgttttgaaagttttggctaagtatttagatattgattaatttaatacgcaaaaaagacttgagaagtaattttcccaagtcttttagtttgctttattaactgctctgaaaatattaagtccgctaattagaatgatgaatccacaagctaaaatcagaaccgtttcaccagagctgtctaacaaaattccggcaacaattgaactaatcggtccaccaatagaggtactggtacgaatagtagttagcactctgcctaatattttatcgtccgcagtaatctgaatcaatgattctgccaaaatattgtgaatactcgtcattagcccaaataagaaaattagtcctgtgaatatcaaccaattgttactgaagaaaattatcaaaagtaatggtactgcactagctatccaagtaaaaccaattgtttttacccgtacggataatcttcctgcaatagttgcacctattacaaagccaatcataaaactgatatagaacatactgtatagtcccgcttgaccattttgttgagcaattcttggcaacagaatggccattgctggcgtcacaaaagaatacaggattgaggaccagaagtaatgacttaagaaataatttgttttaataaacttatagccattaagaatttgattgaggtattttgcctctgcttttttgactttaggtctatctttaatttcttttagggcgtaaaacagaaaaacaaaactgattaggctcagtagactgcagatcaacattacattagctgaaattaaaaaagttaataaaaatccagaaagagcagttcccgctacattcacaagctggtcgatgttgctaactttagaaattagattatttaattcttggtcatcagccgttgtttcttttaaaatagcccggtcagctggattaaaaaattcatcgcagacagatactattcctgcgcagattaatgccaaaatataacttttgctaagttggtaaactgcaattgttgtggcaaataggaaaacagtttgaacaagaattgaatagtaacttgtccttttgaatgaataatgatcgataatggggccgtagaatattgataaggcggcagtggtggaaaagatggcttccgcaattccgacgacaaaggaacttttggtggaagtttgcagccaccagataaagaccatgctgaagagggaattagctagtccgccaacggcacgcgagaaaaaatatgatttcttttttaacattttatttatcctattctcatttttattttccaattataccaatatttttccaattaggatcaatttaataaaaatagtacaaaaaaagacttgagaagtaatttttcccaagtcttttagtttgtcttaatttaggttaattaaaacttgttcttgtccaaagcaactggagaatctggcttttcaccattgatcatcttcaagttgttgtcgaatgccttaacaaccatgttacgtacggcgtgggtggtgtagaaggcggtgtgtggagttaccaaaacgtttggacgatcaattaagtcagctaaacgcttgtctgggaattctttgccttcccaatcttcgttaaatacaccaacttcgtcttcgtaagtatccataacaaagccaaagatcttacctgagtccaaaccgcggataacagcgtcagtgtcaacaagtggaccacgtgagcagtttacaattacaacgccatctttcatcttggcaattgattcgtcattgatcatgtgtacatttgctggaacatctggtacgtgaagtgaaattacatcagcttgcttgtacaagtcgtcaagtgagtcaacgtagtaacccttcttttcgagttctgggttcttgaagatatcgtaagcaatgacctttgcgccgaaaccttccataattctcataaatacttgaccaatgtgaccagtacctacaacaccaacaacttggtcacgaacttcacgaccaatagtaggtgcccaacgtaagtcgcgcttagccatcttttcgtccatacgcttgtcttgacgtaatacacgagcagcttggattgcagcatgttcagcaatagcgtcaggagagtatacaggaacgttagtaatttcaaagccaagttccttagccttgtccatgtcgatgttgtcgacaccaacgttacgtaatgacatcttagttacgccagcgtctgccaatgcttgaagagtttctggggtgtagtctaattgttggtaaacaacaacaccgtcagcacccttagctaacttagcagtttcaggagtcaaaagcttatcagtgtaatctacatcgatatccttgtgagcatccttccattcgtttaagaatggttcttcgtctttacgaatagcgtaagcaaaaatctttgtcataaatttaacctccgtaaaatttattagtatgaccagtcctcattatacgcttttacttgctcaacaaaacacaaaagaaccatttttttgtatagattttaagaaaaataaaagtcaagttttactctgagcaaaaaagttgcaattttttcaaaaaaagtttatagcctaaaaattgcaactattattaactgttacctaatctcaatcccatagatatgaaaattatttttgtatatagcaatattagttaaaggtagtatatggatttgtataagagacgcattttcgttatataacccaggttatataatggactttaagtagagaaacaaacatagcggaggaaaattgaatatgcattttaaaggagaaagccaacagcatttcagcctaagaaagctgacaattggtgttgcttctgtaataatcgggaccacctttatgttttttggtggtcatgctgttcatgcagatgatttaagtagagatgctgagcaaaccagctcagttgttcaaaaacagagtagtgagaaaatagatgtagatgcagtcaaagaagctgataatgtttcaaatcaaagacaagacttacccagacggtactaagagtaccgcaactgttcctgtaactgtcattgcaccaaatgtaccagacgttatctacgtaccaaagggtgacaagtttccagacccaagtactgtagttactaactctaacgatatcaaggacaagattcctgacacgacttacacttggaaaactactccagatactccaaatactaaagtagtaattaactataaggctaataatcctggtactccagataccccagttactccaccagtggatccaggcgataatccagcaaccccagttaccccgcctgtaaagccagagcagaagccaacaacaccaactcctcatgctactaagacaccagcaaaggataatggtggcaagaagacagtagctagtgagcaaaaatctactttgccacaaacggggaagaaggataacgttgctttgactgctatcggtgtagctattgcagctgctggaagcttattaggattagcagatagcaagaagcatagatcttaatttgtaatatctaatttctgtttactaagaagcaagttgactcagataggagctagcttgcttttttgtctaaaagtttaaggatttctaaagacaaaaagcaaatagtgacgcattgtcataaagctgatattatatactcataacaaaaatacaacgcatcaaatagagatgaattgtaagaaggtaacaaatcttctaattccttattaatacatcctattgggcctttattaattcatacattgggtattgctttttgctggttgtcccctatgcaaccgcgaaagttaagattgataataagtccatcccctttttgcgaaggtaaagagtcaagaccccctgcaacatctcttgcgttgaatcttttgttaatcttgataatttatcttcgcaacattagtgatgagtaggctaatgtaaaaaaatctcgttattctcattcaacacaactcccttaaaagggctggtttagaaaagtcatctaaatcagtcctttttctttttttcgttataattaaacttgagaactaaaacaaaggggaagaaaaatgatcttaatttcatggaatatcgattcattaaatgcagctctgactggtacttcagctagggcggaagaaacgcggcaagttttaactaaaattcatgatgccaatccagatattattgcgattcaagaaactaagctgcgtgcaactgggccaactaaaaaacataaagaagtgttggctgaaaagttccctgagtatgactatgtttggcgctcttcagaagaaccagctagaaaaggctatgctggtacaatgtatctttataagaaaggattaactcctgcagtgtctgagccgattattggcgcccctgagccgatggatcatgagggacggataatcacactggaatttgataaatgctttgtcacccaggtttatacgccaaattcaggcagtggtttaaagcgactagctgaacgtcaagtttgggaccaaaagtatattgaatatctgcaaaaattagatgaaaaaaagccagttttagctagtggtgattacaactgtgctcataccgagattgacttgaagcatcccgaaaataatcatcactcagcaggttttactgatgaagaaagagtcgactttaccaatttgctcaatactggctttaccgatacctttagaaaagttcatggtgagattactggcgtatattcttggtgggctcaacgtgtcagaaccgctaaggctaacaactctggctggagaattgattactggctagtaagcaatcgcattgctgataaggtggtccgctcagagatgatcgatacaggcaaacgagcagaccactgcccaattttgcttgaaataaatctttaaattgaagcaagccctagtataatttctttttgaaatgtttttattttgaaaaagaagtaggggttgaaattctttgaataacgagaaaaaagaagattgggctttggagcaggatctgaagtacaatcgtctgacagcatttaagctattcgcgatgactagttcaatggttatttccgttgatgaactcgcaccatttggtaaaactggagcaacggcactgttttacttgttaattgctggaatcgcttggtttatcccgattacgcaaatggctggagaaatggcctcaattgatggctgggaaaaaggcggaatcttcacttgggtgaaaggatctcttggagacaaaacaggctggacagcaatgttttatcaatggattcatattactgttggtatggatacgatgatgtatgtgatcattggggcattgtctatcacatttgggacaccttggttcaacaccacgccaatcgtacgcttcattttaatgatggttattctgtggggagcaacagcgattcaggtaattggtgttagaaagattggtcgaatcgctgaatggctgtttattctggggattgcgacaccagtaattttattgattatttcattcttcgtatatgtgattcaggggcatcccttgcatatgacgattaactggaatactgtaattccacataaattgaatggtaatacattagttgcctttgtcccatttatgttggccttttgtggtggggaagcttctgcaccgcacgttaaaaacttggaccacatcaagtcatactcaaaagttatgcttggcttagccgttactgcaatctgcttcgacttgctaggtagtatggcaattggaatgactgtgcctaaggatcaaatagagaacagtacaggctttgtttatacctatggcaagctgttaacgtcaatcgggctacctggtgatctgttgcaaaaaattgtgggtataatgttagcctgcggtattattggtgagctaggcaactggattgctggtcctaatcagggaatgtatgaagcggctaaagagggctatatgcctaagttttttgctaaaaccactaagcacggcgtgccattaagaattatggttttacaatcaagtatcgttaccatttctgcattattgattacttttaccagtggtgccgatgcagattttgcgtttaacgtttcattggccgcaacgacggcgcaatatctcatggtttatatgattatgttgattgcttacatggttttgaaaagaaagcatgaagattatcaccgtatgtattacatgagcaagaaccctaatttgagtattgcaattgcggtgcttgcattaatcatcacggttatagctttctttgtaacttttgttccagcacaaggcacgccaagcaatttgcgtcacgtttatgtttggaccttaatcggcatgtgtgccattgtgtcgattttgccacttattttgtatcgctggcatgaaaaatggcaatcacaatagaattaagaagcattcgtttttcaagacggatgcttttttagtagaatttgagagaggtgaataaaatggcggatgcgatgagggatgcaatattaaatggttttgttgatcaaaattatttaggaagtgaagaattaggtcctaaaatattagctaataatcagcaagagagaatctggcagaatttgcgccaggaattgtatagttgcaagtcctttacttgggcggttgcgtttattacgcaagacatgctagttccgtttaaggtgataatggcagatttagcgaaaaatggaattagtggcacgattattactggtgattacttgggttttaacaatccgcgtgtttttacggaattacaaaagattcctaatttagaagttcgtattgctaataaggcaggtttccatactaaaggatatttatttgatcatgaaaactatcaaactgtgattattggcagtgctaattttacacgttcagctctgctggctaactatgagtgggctttgaaagtaagttcaaaaaagcaagcagatttaacagctcaattagtggataaaattgcagatttgaaacaggatagttttgttttaaattcagcctggctaacagattatcgtaaaaattgggtaaagcctgagcgagttgctactgatcggcatcagacaaaaattttaccaaataaaatgcaaaaagcggctttaaaacagatagaagcactagttacaagtggtgaaaaacgagggctagtagtgtcagccacaggaacggggaaaacttatttaggtgcttttgctgttaagaaatatcagccgcggcgttttttatacattgtgcatcgtgagcaaattgctaaaaagtcattagaaagtttttatcgtgtaatcggtggaccaagatcggattatggcttattaacgggaaataggcacaatttacaggccaagtatttatttgcgacggtacaaacgataagtcaacctgagatgctggctaattttaatagcgatgaatttgattatatcttgattgatgaagcacacagggcagctgcaccttcgtatcagcgccttttacattattttaagcccaatttttggttaggaatgacggctacgcctgaacgaatggatgagcaaaatgtttaccagatttttgactacaatttggcatatgaaattcgtttgcgggatgcactggaagagaagatgctggcgccatttcattatgtgggtgtccaggattatgaagcagacggagtagtgattgatgaaacaacagatttacgctacctagcttctacatctcgagtagactatgttttaaaggaattagactattacggctattgtggaacaaaggctaaaggcttggttttctgcagtcgacaggatgaagcacgtgaattagctcggctttttagtcaaaaaggacatcccgctgtagcattgaccaatgaggataatcaaaaaagacgtaatgaagtggttgcgtctttagttaaaggtgagattgagtatattgtagcggttgacttgtttaacgaaggaatcgacatccctgccttgaatcaaattgtgatgttacgcaacacacagtcgagcatagtgtttatccagcagttaggccgggggcttcgtaaatatcctggcaaagattttaccgttgtgctagattttatcggcaattataaaaacaattacatgattccgttggcactgaatcaggatacttctcgaagcaaagatcaagctaaacgagaaacgcgtctgccaagctttattgatgtttcaacgattaactttagtaaaattgccagtgaaaaaattttggcttcgcttgatagtgtcaagcttgatgggatgcgtgaattgcggcagagttaccatgatctcaagaacaaactagggcgtgtaccgctactatttgatttttatcaatatggctcagttgcaccgattgtttttgcacaaaatcatggcttggcaagctatgctgactttttgggtaaaatgggcgaagacgttaatttatcaaaatatgaaaatgaagtgctgtcttttgtgactaaggaattacttaatggtaaaagaattcacgagttacttttgttagagatgctacttgaacaagatattgttaagcaagaagattatctagctcaattgaaacgacaccatgcttatgtaaatgatgaattgttagcttctgttgatgcgattttatcgctagatttttttgatattaagcagggaaagactaccaaaaaagcacaatatggtaaattgccgttagttgaacgtagcaatttatttgactatcaattgaatggttctctacgctctgccctagatcaacatgattttaagaatttatttgttgatgctattaaaactggtttggccttaaatcaggaatatgataatcagcgtcaatttactttatatcagcaatatgatcgtaaggacgcttgtcgactcttgaactggcctaaggatgtttcggccccgatgtatggctatcgtgttggtgagcaggacacaccaatcttcatcacttatcataaagatgatcatgaaaagcggaatgctctgtatcgtaatacattggctgatgggcgcagtttgcgctggtatactcgggtaccacggcatttagattctgatgaggtacagcgtttgcttaatacgcgagggatgaatttgcatatatttgttaaaagaagcgatgcagatggtaagcagttcttttatttaggcaaggcaaagattcaagctgattctgttcgcgaagaattgctcggtgttaagaaaaagccagctgtagggatgaacttaatgttgaaacatccactgagtgagtcaatgcatgagttattatttgaatagaccaaaaaagcctttccgcttaggaaaagcttttttaattgccgctaatattaattagatcttggtcatcttggttattatccttatcaaacattctaggcttgatgtgatctagaatcttagtcccgatatttttctgagcagtttcatcaccgctaacctggtttaaaaacataattattccatatcgattatctgtagtcattttgatccaattaccaaaatgagtgttgcttaagctaccataagcagatttagtatggtcatcatctaaatgaagccctccagaataattagtggttgcacttttaagatgagttaagtaatagaaatcggatttgcttaagatactaccattggttaagccgagctggatcttgtaataatccattggggtagtgaacatattgcctgcgcctggaagctgggaggcaagagtctttttaacgtattcagcgtcttggtaattttttttaccattattccagacgtaagagataggatcggttttccaactaggaatatcctgataaaggaatgtattagcaagccctaatttgttaatgatgcgattattgaaattgttttcgtaggattgtccgctgattttaataataattccggctaataaaagatagttggtattattgtagaagtaggttcctggtgtcccttgagtgccgttattagtattatcaatagcccaattgatggcgtcattctcacttaaaacttttccgcgatccaattcagtattggttgcttgaatgccagaagtatgggtcattaactgtccaatagtaatattatcggcgtttttaagattagggtaccaacgtgaaattttggtgttttgcgtaaatttttgactagtgtgccagttttcattcatcagctgaattatcattgctgctgtaacaactttttgcaaagaagcagttggataaactacgttgtcgttcccattaccaacttttttaccgtaccaagcgtagccatagctgatttgttgcggctgaccgtttttgataatgacgatactaccgcgagtattgttttgagccaaagtattgcggacaaaatttcgcatttcggttttaaagtatgaactggcttgaacttgtggtggttcagtgatcgcaaatgcaggaactgtcgttagcagcgcagcggtagctagtccaataattgattttttcaaaaattaaaaggcctcccttaaaaagtggtttgtttacattttagcgcgttctttgcatcggacaaactattatcttggtgaaaagacgtatttttagctagcttgttgaaaaagtgcggctaattttgctctgagtgcgggatcatgagcgtataaataggtaccgcggattcctcgcttgaatagaacgttgagtgaattcatgaccatcttctcttcatattctattttttcttttgagttggttagatcattacgctttttgaacatctcaacatctgtaattttgtctaaattaactttaagttgattggtgcggggaatcaggctgattggtggaccgataatgatgccagcataatttaggtcaaaaccttggcaagtatagatagaaccaacttcattgattgttgtaggaatttctgcccaaggagttgatgtgtagttgtattgatcccatggcagcataaatttcccttctttaatgtaatgtttgccaccatcaagagtagatggatagccggaagttgaaagaattcttgccaggccgtctgtttgatttctcttgacgatttcttgccgcattttttctgcatcagtaaaaatacgaaagtcgtagttgtgccacatttctttttttaagggcattaatttattatgtgtaaaaaagttaaaccattctattagactatctggtgccatcattctaaattgatgatgtagttgatagtcttcgtggggataatgatgagtaattgcttcaagtcgcttacgtgtccagaagcttttcattcgtaaaacttggttttcatcaaataccaaaatgataacttttgaccgcttaataacctcctctaattggttatcgtgataaaagttgttgtagtgatcaggctgagataagagcaagtgtgcttcatcaatgacgacaacatcagcactggtttgttttttgtccatctgattaataaatgaagttggccgcatataatttttcttatatagttctttaatcggcccagcaatctgcttatagacttttagcagttcagggtgatttactaaaaagtagttttgagttttatacagttggctgcctgtttggtggtttaatttttgcaactgatcaaaaagggcagaaagcactacacttttaccagtacctgcttcaccataaatagtgaaaacagcaggatgatttttattgctgcaatgtgtaatcgaaaaatgtaaaattttttgtacgagaagtgattgctcttggttgagctgatggtaaggagagagtttaaaacttgcttgattattcaatatttattcacctcgttttcaattataatgaatagaaataataatgataaaggaagaaaacatgactgcacaaaaaataattcacaatcggctatttttaagacaaaaatctgatttagctggcaaaaatgatttacaagttgcgataaacttgcgtgatacgctactagctaatcgtgggaaagctgcggggctggctgcaaatatgattggtcagactaaacaaattattgcgttttatgctggcccgcttccatttgtaatgctgaatccgcgtattattcaaaaaaagcagatgtatcttgctagtgagggatgtctgtcactagaaggcgagcgtaatgttcagcgctatgaagaaattactgttacttatcagaatatggagttagaaacagtaacgcaaacttttggtgactttatagctgaaacgattcagcatgaaattgatcattgcaatggaattctgatttgaatagtagaatatttacgtgattttgcaaaaaaagtaaaaaaaatttaaattaattttgcatggtttcagggatgaaaacccacaattttcgaataattagatttgatagaataaaatactttttaatttaatgcaaagataaagaaaaatatattacaacactacctagtgtatcgtgaagaacccgaacgaagagcaagacttgccaaagcggagaaaataaggtaaattaataaagtcgcttcgagagatgcgacgagagcttaaaaacagacatgcaaggaaagaaaacaaataaaaagaaaaaagtacttgcaaagaagtaaataagctggtaatatatttaaatgtcgtcaggtgaaagcagaaaaagcttgagcaagacgaaaaaaacaaatcaaaaaagttcttgacaaagaaatgatggtttgataaaatataaaagctgtctgctttgcaaaaaagcaagacagaggtagtactttgaaaactgaacaaagtttcgctaaaagcgtgcgggtgtaaaaacccaaacaagaagcgaagtcaattcgcaagcaataaatttgagacaaagatcttaaataaggaatgagcaatcattcaaactttttaaaatgagagtttgatcctggctcaggacgaacgctggcggcgtgcctaatacatgcaagtcgagcgagcggaactaacagatttacttcggtaatgacgttaggaaagcgagcggcggatgggtgagtaacacgtggggaacctgccccatagtctgggataccacttggaaacaggtgctaataccggataagaaagcagatcgcatgatcagcttttaaaaggcggcgtaagctgtcgctatgggatggccccgcggtgcattagctagttggtaaggtaaaggcttaccaaggcgatgatgcatagccgagttgagagactgatcggccacattgggactgagacacggcccaaactcctacgggaggcagcagtagggaatcttccacaatggacgcaagtctgatggagcaacgccgcgtgagtgaagaaggttttcggatcgtaaagctctgttgttggtgaagaaggatagaggtagtaactggcctttatttgacggtaatcaaccagaaagtcacggctaactacgtgccagcagccgcggtaatacgtaggtggcaagcgttgtccggatttattgggcgtaaagcgagcgcaggcggaagaataagtctgatgtgaaagccctcggcttaaccgaggaactgcatcggaaactgtttttcttgagtgcagaagaggagagtggaactccatgtgtagcggtggaatgcgtagatatatggaagaacaccagtggcgaaggcggctctctggtctgcaactgacgctgaggctcgaaagcatgggtagcgaacaggattagataccctggtagtccatgccgtaaacgatgagtgctaagtgttgggaggtttccgcctctcagtgctgcagctaacgcattaagcactccgcctggggagtacgaccgcaaggttgaaactcaaaggaattgacgggggcccgcacaagcggtggagcatgtggtttaattcgaagcaacgcgaagaaccttaccaggtcttgacatctagtgccatttgtagagatacaaagttcccttcggggacgctaagacaggtggtgcatggctgtcgtcagctcgtgtcgtgagatgttgggttaagtcccgcaacgagcgcaacccttgttattagttgccagcattaagttgggcactctaatgagactgccggtgacaaaccggaggaaggtggggatgacgtcaagtcatcatgccccttatgacctgggctacacacgtgctacaatgggcagtacaacgagaagcgagcctgcgaaggcaagcgaatctctgaaagctgttctcagttcggactgcagtctgcaactcgactgcacgaagctggaatcgctagtaatcgcggatcagcacgccgcggtgaatacgttcccgggccttgtacacaccgcccgtcacaccatgggagtctgcaatgcccaaagccggtggcctaaccttcgggaaggagccgtctaaggcagggcagatgactggggtgaagtcgtaacaaggtagccgtaggagaacctgcggctggatcacctcctttctaaggaagcgaaggatatggagagcaggaatgctaagagaagtatccagagcaagcggaagcacactgagaaactttgtttagttttgagggtagtacctcaaaaagagctagtacattgaaaactgaatataatccaagcaaaaaaccgagacaatcaaagagaacagattgtagagcgaccgagaagagaattcttgagtaaggtcaagtagaaaagggcgcacggtgaatgcctaggcactaacagccgaagaaggacgtgacgaactacgaaaagcttcggggagcggtaagtacgcagtgatccggagatatccgaatgggggaacccaatgcagagatgcattattgattagtgaatagatagctaatcaaaggaagacgcagtgaactgaaacatctaagtagctgcaggaagagaaagaaagatcgatttccttagtagcggcgagcgaagaggaaagagcccaaaccaagtgatttatcatttggggttgtaggactgcgacgtggcagtgtaagagatagttgaattatctgggaaggtaagccagagagggtgagagccccgtaagcgaaatctcaagcacgcctagcagaatcctgagtaggccgggacacgaggaatcccggttgaaaccgcgaggaccatctcgcaaggctaaatactagttagtgaccgatagtgaaccagtaccgtgagggaaaggtgaaaagaaccccggaaggggagtgaaaaagaacctgaaaccgtgtgtctacaagtagtcaaagcacattaaagtgcaatggcgtgccttttgtagaatgaaccggcgagttacgttatctagcgaggttaagtcagaaaagacggagccggagcgaaagcgagtcttaatagggcgaaaagttaggtgacgtagacccgaaaccaagtgacctacccatgaccaggctgaaggtgtggtaaaacgcactggagggccgaacccacgtaagttaaaaattgcggggatgagttgtgggtagcggtgaaattccaaacgaacttggagatagctggttctctccgaaatagctttagggctagcctcgtggagaggataatggaggtagagctctgtttggactaggggcccgtcaggggttactgaatccagataaactacgaattccagatatccatacacgggagtcagactgcgagtgataagatccgtagtcgaaagggaaacagcccagatcaccagttaaggtccccaaatctatgctaagtggaaaaggatgtggagttgcgtagacaactaggacgttggctcagaagcagccatcattcaaagagtgcgtaatagctcactagtcgagtggcgctgcgccgaaaatttaccggggctaagcatagtaccgaaactgtggatgtgttttaaagagcacgtggtaggagagcgttctaagagcggagaagttgaatcgagaggatcaatggagcgcttagaagtgagaatgccggtatgagtagcgaaagataggtgagaatcctatccgccgaaagactaaggtttcctggggcaggctcgtccgcccagggtaagtcgggacctaaggcaaggccgagaggcgtagtcgatggataacaggtagagattcctgtactgtgtcaaatcgttaagagcgaaggagggacgcaggaggtgaagcacgcatcgcgatggaacgatgttcaagcaacaagtgcggttaagagtcaaatgcttctaaccagcaacacgagttgtgaagaggagtgaattaaaagtagcgaaggtgtggtaatcacactgccaagaaaagcttctagccagagatgacatacccgtaccgcaaaccgacacaggtagtcgagtggagaacactaaggtgagcgagagaactctcgttaaggaactcggcaaaatgaccccgtaacttcggaagaaggggtgctagccaagagattggttagccgcagtgaataggcccaaacaactgtttatcaaaaacacaggtctctgcaaaatcgtaagatgacgtatagaggctgacacctgcccggtgctggaaggttaagaggagagcttagcgtaagcgaaggtttgaattgaagccccagtaaacggcggccgtaactataacggtcctaaggtagcgaaattccttgtcgggtaagttccgacctgcacgaaaggtgtaatgatttgggcactgtctcaacgagagactcggtgaaattataatacccgtgaagatgcgggttacccgcgacaggacggaaagaccccatggagcttcactgtagcttgatattgagtatcttttaaacatgtacaggataggtaggagccagagaagataggacgctagtcttattggaggcaatgttgggatactacccttgtttgaaggatgctctaacctcgacctgtaagccaggccagggacagtgtcaggtgggcagtttgactggggcggtcgcctcctaaagtgtaacggaggcgctcaaaggttccctcagaatggttggaaatcattcgcagagtgtaaaggtataagggagcttgactgcgagagagacaactcgagcaggtaggaaactaggacttagtgatctggtggtaccgtatggaagggccatcactcaacggataaaagctaccctggggataacaggcttatctcccccaagagttcacatcgacggggaggtttggcacctcgatgtcggctcgtcgcatcctggggctgaagtcggtcccaagggttgggctgttcgcccattaaagcggcacgcgagctgggttcagaacgtcgtgagacagttcggtccctatccgtcgtgggcgtaggaaatttgagaggagctgtccttagtacgagaggaccgggatggacgcaccgctggtgtaccagttgttccgccaggagcatcgctgggtagctatgtgcggaagggataagcgctgaaagcatctaagtgcgaagcccccctcaagatgagatttcctttgcgtaagcagtaagacacctcagagacgatgaggtagataggctgggagtggaagtcctgtgaaggatggagcggaccagtactaatcagtcgaggacttgaccaaagcgaagcaaactggaaggttttttgcgagaaggattatgtttagttttgagtgtaaaagctcaaaagagtacggtggcgaaagcaagaaggatacacctgttcccatgccgaacacagaagttaagcttcttaacgccgaaagtagttggtgggcaactgcctgcgaggaaaggaagctgccgtgctcttttttaatattccggcttagctcagttggtagagcgcttgactgttaatcaagatgtcgtcagttcgagtctgacagccggagtaaaggggagaaggaagcggaagacttcctttttttgtgccttttgggtatgttaaaaggctaattaggctaagcaagcatgacttgagggtcaaatttaatataatcattaatagaagacatagtaaaattcctaacaagcttaattgaattgattacggaggctatgctctctttttaagtgcataaaaatcttatagatagattattataaatacgcgtggtgctagttaaatcgttctaggcaatatgccatattataagctaaaatggctatttctagccgctgctgaaaaccagctaagcaaagaaaagtcgctctcaattgttcttctaattgccatcagttgatgatcgttatgctttttagcgcctttcatgtttcttcgatatggtgtccaaaggacatagcccataccttttaactcggcagttaagtcttttcctaagtagccttcatcgcctaaaagataatggttaattggatgagcattaatcatcaattctgtcgtttctttggcatcatgcactgatgctttagttcaagtacatagccatcatcgcttactagcgcgtgaaccttgaagccgtaataatagatttttttagtggctttctagccgatatcagctatgccacgaaagatcttgacgcgatagttgcggataggctgacaaactgggaaactgtcaataattaagaattctccagctgtttttacttcttgattccaatcttgacggatacagcgcattaaaggcaaaagcattcgtgcccgacgattaaagcgagaatgagacaaaccgacaaagaatttacaaaatcttctttgagattcgataccaatttcagtttgccaaataagcatcgctaagatggagctgtcagaaattttaacctgatcaacatttttacggtgcttcaattcatcaggagcacaaagcttgtacaaagaacgacaaattacatttaaccgagcaactaagtgtataattttttacggtaagttgaataaataattaaaaaagcccaagtcctttgaatttggacttgagctcaaacaaaaagaccagtagtctgatgttaagaacaaaaaacacattagaagctggtcttttatgaattcaattgtaactgaaatcgcaaatattataaagtctgaagataattatattaagcgtgaaagaaaaataatctgtttcttcttaaacctgattaaggaaatcatggccttggctttagctaaagttgatgatgaaatgattaccaaggttaaagcacagggctatcagattgataagaagaatgagcgctcaatcaatatggcttttggcgaagttaggtatgtcagaagaagatatgtctgcccaggcaaacaagcaaggtatcccttggatgaattaatgggctttgacaaatacaagcgctacagtattttagcagtcaaaaacatcttagaagtaagcagcgttgccacttatcgcaatactgctctagcagtcaattgcctgtctggctttaatattagccatatgcaggtgggcaatttggtaaaaatggccgggaaaaatattaaagcgggccaagaagcagattcaagatatgatgccgcaggcactaagaaaaaggtcccagttttgtatcttgaaggcgatggcgtggtgatcaaaggcactaaaagccggttggaatttcatcgctatcaggtctgtgaaggcattgtcaatataagcaagaaacgcagaaagcgaatcaatgccaaggaatttgtttctttaagccgacttgatgcgctgaacgaagccaaggagtacctggccaatacttatgatctttctgatactgtaattcttagcaacgccgatggcggtgctggatatgccaaaacagacttcgatgacattgtagggctatgcaagcgtcatgagcatttcttggatgtctttcacctaaataagaaaatcaaagaaaggctatattttgcgcctgacctgcaaggcaagctgatttctgctttggaatacaaatacagctatgacaaagttaaaactatcctaaccactgcagaaagccgactaattgatgaattgaataccgagctcaatcatgattatctggggcgcctaaggaattatattgatcgtcattgggacgatattaagccgtttaagaaacgaaaactgactgtgactaaagccattggctgctgcgagagcaaccaccgcaagtatacctaccgtgttaaggggcaaggcaagaaatggtcaaaatctggagcagaaggcatgcttaggatcttaagctgcatcaagaatcgagagctggaattttggcttagcagcgagtttgaagattcagaaataactgtattgactgaacaggaattaaaagcagcggcccgtgacagcttaaagaagcgtcatgaagttcatttaggcatccagcatggcgcattaaccgcacaggtagctggcaatagttatttaagcaagctaagcagaaatttaagtcatataaatatttaagaaattaaggttagactaatggtttaaaggctaccgcaaaaacattgacacttacaccgagcaaagctaacttgtaaatggtgagaaaaacgattaagcttgagatagttcaattagatcggactcttttctatttaatttaagttacaacttgagtctaatccgattggacttttttattaactagcaccacgcgtttataaatattcaacgacagtaaaattaggtaagcaatctatatctaggaatctgttggggttctgattgtagtaggctaattatacaaaaatgagttaacaaaattctgatcagaattagtacggttaagattgaaaaaatagctggtaattattactgtatctctttgtaattaggtagcaatgctattttttacttctaaaatataattaaaccggtcagacaattcgtattgatctgaatttggataaacagttataacaaaaatatgtgtgcaaagcagatgacagggacttttaattgatctcgtatgttggagcgcgctgtgttgactatttgttctaagtgaacagatgataagtatgcctctatctaagtaccaagatctaggaaattcattctgaagtagttaatatgtgtcaatatgtcgcacaaaggtaactatgaattacagcaacataagagaaatttgaaaaatagtttttaaattgtggcttgttattagtgaaaatgataaattaaatattattttggcagaaaatacagcttaataacaaaaaataaaaatattttttgcttacctttaaaaatatagttcgagatttataaagtttttaacgagttaaagtgatatttctataattgaaagcagattctactaatgtaattactataatcagaataaatatttcataaaaatacatagaacccgaacgaagagcaagacttgccaaagcggagaaaataaggtaaattaataaagtcgcttcgagagatgcgacgagagcttaaaaacagacatgtaaggaaagaaaacaaataaaaagaaaaaaagtacttgcaaagaagtaaataagctggtaatatatttaaatgtcgtcaggtgaaagcagaaaaagcttgagcaagacgaaaaaaacaaatcaaaaaagttcttgacaaagaaatgatggtttgataaaatataaaagctgtctgctttgcaaaaaagcaagacagaggtagtactttgaaaactgaacaaagtttcgctaaaagtgtgcgggtgtaaaaacccaaacaagaagcgaagtcaattcgcaagcaataaatttgagacaaagatcttaaataaggaatgagcaatcattcaaactttttaaaatgagagtttgatcctggctcaggacgaacgctggcggcgtgcctaatacatgcaagtcgagcgagcggaactaacagatttacttcggtaatgacgttaggaaagcgagcggcggatgggtgagtaacacgtggggaacctgccccatagtctgggataccacttggaaacaggtgctaataccggataagaaagcagatcgcatgatcagcttttaaaaggcggcgtaagctgtcgctatgggatggccccgcggtgcattagctagttggtaaggtaaaggcttaccaaggcgatgatgcatagccgagttgagagactgatcggccacattgggactgagacacggcccaaactcctacgggaggcagcagtagggaatcttccacaatggacgcaagtctgatggagcaacgccgcgtgagtgaagaaggttttcggatcgtaaagctctgttgttggtgaagaaggatagaggtagtaactggcctttatttgacggtaatcaaccagaaagtcacggctaactacgtgccagcagccgcggtaatacgtaggtggcaagcgttgtccggatttattgggcgtaaagcgagcgcaggcggaagaataagtctgatgtgaaagccctcggcttaaccgaggaactgcatcggaaactgtttttcttgagtgcagaagaggagagtggaactccatgtgtagcggtggaatgcgtagatatatggaagaacaccagtggcgaaggcggctctctggtctgcaactgacgctgaggctcgaaagcatgggtagcgaacaggattagataccctggtagtccatgccgtaaacgatgagtgctaagtgttgggaggtttccgcctctcagtgctgcagctaacgcattaagcactccgcctggggagtacgaccgcaaggttgaaactcaaaggaattgacgggggcccgcacaagcggtggagcatgtggtttaattcgaagcaacgcgaagaaccttaccaggtcttgacatctagtgccatttgtagagatacaaagttcccttcggggacgctaagacaggtggtgcatggctgtcgtcagctcgtgtcgtgagatgttgggttaagtcccgcaacgagcgcaacccttgttattagttgccagcattaagttgggcactctaatgagactgccggtgacaaaccggaggaaggtggggatgacgtcaagtcatcatgccccttatgacctgggctacacacgtgctacaatgggcagtacaacgagaagcgagcctgcgaaggcaagcgaatctctgaaagctgttctcagttcggactgcagtctgcaactcgactgcacgaagctggaatcgctagtaatcgcggatcagcacgccgcggtgaatacgttcccgggccttgtacacaccgcccgtcacaccatgggagtctgcaatgcccaaagccggtggcctaaccttcgggaaggagccgtctaaggcagggcagatgactggggtgaagtcgtaacaaggtagccgtaggagaacctgcggctggatcacctcctttctaaggaagcgaaggatatggagagcaggaatgctaagagaagtatccagagcaagcggaagcacactgagaaactttgtttagttttgagggtagtacctcaaagatttgaaaaacgccaagcgttagtcgggcctatagctcagctggtttagagcgcacgcctgataagcgtgaggtcgatggttcaagtccatttaggcccattgacataacgaagaaaaagagttaaagttatgtctggccgaaaataaaatactctgggggcttagctcagttgggagagcacctgctttgcacgcaggaggtcatcggttcgaacccgttagcctccattgatccagaaaaaggatcaaagagctagtacattgaaaactgaatataatccaagcaaaaaaccgagacaatcaaagagaacagattgtagagcgaccgagaagagaattcttgagtaaggtcaagtagaaaagggcgcacggtgaatgcctaggcactaacagccgaagaaggacgtgacgaactacgaaaagcttcggggagcggtaagtacgcagtgatccggagatatccgaatgggggaacccaatgcagagatgcattattgattagtgaatagatagctaatcaaaggaagacgcagtgaactgaaacatctaagtagctgcaggaagagaaagaaagatcgatttccttagtagcggcgagcgaagaggaaagagcccaaaccaagtgatttatcatttggggttgtaggactgcgacgtggcagtgtaagagatagttgaattatctgggaaggtaagccagagagggtgagagccccgtaagcgaaatctcaagcacgcctagcagaatcctgagtaggccgggacacgaggaatcccggttgaaaccgcgaggaccatctcgcaaggctaaatactagttagtgaccgatagtgaaccagtaccgtgagggaaaggtgaaaagaaccccggaaggggagtgaaaaagaacctgaaaccgtgtgtctacaagtagtcaaagcacattaaagtgcaatggcgtgccttttgtagaatgaaccggcgagttacgttatctagcgaggttaagtcagaaaagacggagccggagcgaaagcgagtcttaatagggcgaaaagttaggtgacgtagacccgaaaccaagtgacctacccatgaccaggctgaaggtgtggtaaaacgcactggagggccgaacccacgtaagttaaaaattgcggggatgagttgtgggtagcggtgaaattccaaacgaacttggagatagctggttctctccgaaatagctttagggctagcctcgtggagaggataatggaggtagagctctgtttggactaggggcccgtcaggggttactgaatccagataaactacgaattccagatatccatacacgggagtcagactgcgagtgataagatccgtagtcgaaagggaaacagcccagatcaccagttaaggtccccaaatctatgctaagtggaaaaggatgtggagttgcgtagacaactaggacgttggctcagaagcagccatcattcaaagagtgcgtaatagctcactagtcgagtggcgctgcgccgaaaatttaccggggctaagcatagtaccgaaactgtggatgtgttttaaagagcacgtggtaggagagcgttctaagagcggagaagttgaatcgagaggatcaatggagcgcttagaagtgagaatgccggtatgagtagcgaaagataggtgagaatcctatccgccgaaagactaaggtttcctggggcaggctcgtccgcccagggtaagtcgggacctaaggcaaggccgagaggcgtagtcgatggataacaggtagagattcctgtactgtgtcaaatcgttaagagcgaaggagggacgcaggaggtgaagcacgcatcgcgatggaacgatgttcaagcaacaagtgcggttaagagtcaaatgcttctaaccagcaacacgagttgtgaagaggagtgaattaaaagtagcgaaggtgtggtaatcacactgccaagaaaagcttctagccagagatgacatacccgtaccgcaaaccgacacaggtagtcgagtggagaacactaaggtgagcgagagaactctcgttaaggaactcggcaaaatgaccccgtaacttcggaagaaggggtgctagccaagagattggttagccgcagtgaataggcccaaacaactgtttatcaaaaacacaggtctctgcaaaatcgtaagatgacgtatagaggctgacacctgcccggtgctggaaggttaagaggagagcttagcgtaagcgaaggtttgaattgaagccccagtaaacggcggccgtaactataacggtcctaaggtagcgaaattccttgtcgggtaagttccgacctgcacgaaaggtgtaatgatttgggcactgtctcaacgagagactcggtgaaattataatacccgtgaagatgcgggttacccgcgacaggacggaaagaccccatggagcttcactgtagcttgatattgagtatcttttaaacatgtacaggataggtaggagccagagaagataggacgctagtcttattggaggcaatgttgggatactacccttgtttgaaggatgctctaacctcgacctgtaagccaggccagggacagtgtcaggtgggcagtttgactggggcggtcgcctcctaaagtgtaacggaggcgctcaaaggttccctcagaatggttggaaatcattcgcagagtgtaaaggtataagggagcttgactgcgagagagacaactcgagcaggtaggaaactaggacttagtgatctggtggtaccgtatggaagggccatcactcaacggataaaagctaccctggggataacaggcttatctcccccaagagttcacatcgacggggaggtttggcacctcgatgtcggctcgtcgcatcctggggctgaagtcggtcccaagggttgggctgttcgcccattaaagcggcacgcgagctgggttcagaacgtcgtgagacagttcggtccctatccgtcgtgggcgtaggaaatttgagaggagctgtccttagtacgagaggaccgggatggacgcaccgctggtgtaccagttgttccgccaggagcatcgctgggtagctatgtgcggaagggataagcgctgaaagcatctaagtgcgaagcccccctcaagatgagatttcctttgcgtaagcagtaagacacctcagagacgatgaggtagataggctgggagtggaagtcctgtgaaggatggagcggaccagtactaatcagtcgaggacttgaccaaagcgaagcaaactggaaggttttttgcgagaaggattatgtttagttttgagtgtaaaagctcaaaagagtacggtggcgaaagcaagaaggatacacctgttcccatgccgaacacagaagttaagcttcttaacgccgaaagtagttggtgggcaactgcctgcgaggaaaggaagctgccgtgctcttttttaatattccggcttagctcagttggtagagcgcttgactgttaatcaagatgtcgtcagttcgagtctgacagccggagctagcggaatatgaaagaggcgggggccagaggcttccgcctttttgtgtgctattaaagttctataattaagcttttctaagtcttgaaatttttttaaatagggtttccaaggaactttgaggagtttgtactctgaatggtattgatggatacgttattttttctgccggaaagccacagaatggacaagtgggctgctttaaaagggcttcgtagactttgtattgcactccattgaagaatttatagaaattgttgtaaaaaacgatatttttatctttaatatcgagatcaaatttaatacaatcattaacagaggacatagcacaactcctaaatagcttaattgagacagaatatcataaatattcatcaacaggaaaaattatagagctaataaagaagttatagctttttatttgcgttatgaaatgtataaacttgttgtctttgtctctctattagactggtaaatattcaaaagtatatgttaaatttcagacattaaatacttagaaaaaaggacatatttagatggataaaaattctgatagacttacgttagtgccatatttcccgaatgaaaagcagactcttaaatggtaccaggatcctaaaatctgtaagcaggtagataatattgataccgtttatgatttaactaaattacgtcgaatgtatgaatatttgtcagtgcatgggtggtgctactatattcaatatcaagggaaattgattggtgattgtactttgctaaaagacggtgagatatcaatcgtgatttgcaaagaatatcaaaacttgcatcttggtagaaaatgtgtcgacaaattggtgcagcttgcaagaattcagaaaatgacgcaagtgaaggctcacatatatgactttaatattcaaagcaaaaaaatgtttacaagaatggggtttaaagagcaacaacctgactggtactcttatgatttatagatcaaaaatattcatgttaccaagtaattcatacaaacaatcagttggtgtgatgtcagataagcactcgtattagaaaaatgtaatcatcagtaattaaagactgtagttgaatcaaataattaactcagcgtataaaatgctgagttagacaaaaaaataacgagcaattctctcgttgttttatggattcattttgatcaaatttttagtttatctttagttgtaaataccaacttgattaatgtgggccaattccagaactggagattgagcgaggtccaaactaacatcacagccagcatggataccattattttcgccattaagccagtgggtattattagttacgtaatagacagtaccattaaatgcaatataagctggacgtccatttttaccattgtaatttgatagagtttctttagtaaattttctcatataagaagctcctttctaataagatcttgatatattaatggtaacactgtgtcaccttatagcaagagatacgaaggagtcttatgcttttcttatgaaagatgaccacgccacccagcaatatcccaatctagaaagtcataattaagctttttaccataaattttctcgtaggcagcaactttttgtcggtagtcgagttccatcatcttatgagcgttttcgttggcgtttagagaaacgtcagggaagattggtggtaaaacatggacaatatatttggtctcataaaaattaggatctttcttttcgattttaggtagatccttaatctcgacaaaagtggagattaccggtacattttgtttagccgcaaaataataggcaccacgttgtaatttgcgaggcttgcgataattccaccacatctcctgttctggataaattaaaacccaattatttttagctaaaactgcactgaggtgcttaggaaattcatttccaatatagctaggactctgaactagtggaatagtgccaacataattcattaaatagcggaaaaatcccggtagcattaggttagtatcttcaattacaattgaaagttgatggtgcatcttgttagcgagcagcttcattggtaaagaatcaacctgattgtagtggttagaagttaaaattgcgccaccaataggtaaattatttaggttctctaaacctacaaattcagttgatccagctaatgctctggataaagtaccaaataagagatgtccaatacgattattaagcttacttgaaaaagtgttacgcttattccaataatcattgaccaatttaaggcgctgatctagggacatttggggatcgccgatttctacttttgctgtgaagttgcgttcattagcagctttttttatatttttaatcactgcctcacgattatcgccaaaaatcatagtgttactgcctctcgtttcttaacttttgcccaattattaggatcttgctcagttttgtcttccttagcaagcatatgatccaatttttcgcggtctgctgcacgctcgtcatcagtataattattgagttcgttctttaattcatcgaaaaactgcgtttgtttggcactatcccagaagtactgtgcatattggacattagcaaaatgccatggcttaaagaaaagattatagtgaatcagaccaggattagttaaaggttcagtgttttcatttggcatagcatcccagcgaggatttaagtgcaaaattctaccttccccgatttcatttaaatagtcttgatcaggagcaatacaatcaaaatgatacttttctaaaagtgtcataaaatggtcaataaaatgttcagcgcgaaaggccctagcattcatgacgagcatgccagagttaatgtatttcttggggtcaagtgccaggacatttttgatgtattttatcatcttgtctacatattgaattgaggagtcggtgcaagcagcaaataaattatcacccaattcggagttgtatagtttagcaagatcgtcgtttacaattgtgtcgctatcaatatagatcaccttatcatattcgggaaaaagttctggaataaagaggcgataaaaaatcgacatggtaaaaaagtcagcgcgaagaaagttttccttacgattttgaataggttgtacaagttgattatcaatatggaaaaacttcacatgaacgtttgaactgctaagattagacaaagctttttgatgctttgatgagagatcttgatttaaaaagtaaacagtataatccttatttggatctgtatgtttgactaaagaattaagagaaacagcagcgtatttggtaaagtcatcgctgatactgtaaaaaataggaattgtcataaaattacctttcttagattttaactgattccgtttgtttaaccttagcccaagtatttggctctttgacaatcatgtcaacttttttagccatccattctaggtcagctcgtgccttttgacggtcttcatcagtaaagttgtctaattgctgctttagttcatcgtaatacggcgtagttttagcaacataccagaaataatgaccatattgaacatcagcaaaatgccatggtttgaagaaaagattgtagtgcacgatcttaggatcttgaatttcaggaatgctttcatttggcatagcatcccattctttaggtaggtgataaatcttatcttcgcaaatttcattcatgtaggcttgatcagggtcaacgttatcgaaatgatatttattcattaagtaatagaatttatcaacaaactttttgtctctaaaggccttcatattaaacagaattacaccattattgatgtatttttctgcaggaaaaattccctgacattctttaatgtacttttgtaaaagtggcatgtaacgaattgataagtcgggacatgaagcaaacatgttgtcggcgatatcaatttcatacattttagcaatatcagtacagataatagtatctgcatcaagataaactgccttgtcatattgagggaacaattctggaatgaatagtcggtaaaaaattgacatagtaaagaattgagcacgcaagtagttttccttagtattgtgaattggcttaaccatgtcatcgtcaatatgaaagatttgaacatgaatattatcagttgaaagatcttctaagctctttttgtgctcatcagatatctgttggactaaaagggtaatcgtatagtccttcttggggtcagtatggtcaattaatgatttaattgaaacatatgcatatggcgtataattatcgctaattgtgtaaaaaacaggaatggttttcaaaataagatcctcctaaattatttttttaaattatttcgtaatttgagatattcgttaagcaaatcatcatattcatgtaaatgaagtacactgtgtacgcgatcaacatcccatggcttaactgtttgagtatggaaataaggccaaaacctaaagctagtagtgaaatgttgaattttggtgtttttttgcaaatgatattgctcattataacggcgtggtgctactcgcttggctacagctagcttgtttattgctgattggtcgggcaaaaacatttgcttaacctgcatcatatgccgcacctcggcaaagagatcagtttgcttaattttcttcatattcagcaacaaaacgccagaattaagataatcaaatgcgcgcttggtcttaagattgtggaagaagaagcggccccaataatcaagtacgcccactaattcgattccggtaatatcctcattgtaaaaagttgtaatatcaccgcgaatgacaatgtcatcgtctaaataaagaatgcgatcaggaatctgtggcaattggtctgcaaataaacgcaacatagcatatggcgtgaagcgagtattcatgttagcggttggcggttcctgttcaaataacttggtgcagtcaattaattcaactgtactgttaggattggctttttttactaaagaacgtaaaaaatcagccgcatgttgtgagaaagggtgatatttacgttcatcactgtgtgcctccatcgttaaaatataaagatgcaattcttgagcaccagaatttttgattaaagataaggtggaaatcaaaacgccatcttgagcattttcatctccacaaaaaagaatattcatgataaactcctattttttatttcttttgaatatattgacaatattcataatcgctattttttgcacgctgcttcattacctgccaaatttcatcgtgaagcttattttgagcttccttacggcttaaatttgtatccgggtaaaagggcccatcaatgtaaataacggcactaggccgcttgctaagccactttttatggtaggttttggtcatgacgaaactaggcgcatttaatttaactggaaagtgcatgcttgttgcatcgaacgggcgaatcttcgtgtaatagggccagacatgagcttcagggtagatgagaatctcgccctttttatccttaatcacagtttgaatggctttaattagtttgagcgattgcttcatatttttgccaacaggcagaccgccgtagcgtacaagatatttgccaatgaaagggatgccccagttagcttgattagcaatagcataaaaatttttgattggaaaaattgtgagcgaggtaaagacatcccccatgggtctagtatggttgccataaataaaatagcccccattgacttgcttaagtttttcttaaccaacgacttttacatgatcgaagaagcggaaaaccacccaaccaaaagtgcatgctaagtgacgagcggtagtggaccagattctagctccaagagaattaggtagaataacgtaattatcgggtagactgaaattttgatcgtgactatcgactacatcatcggttgttttttggtaataataaatccgtttcatcttgccctccatgatacttatgtatcctatgataccatggaaaaaagcctaattcctaagacgagaggaatgctgaaagaaaataaaaaagattcgtaatttcatgatcgaaaaatacgaatcctctgtaaaatagcataaaaaaagcaccgccttcttgcagtgcatctttcatattatgggtggccaggggatcgaaccctggacccacggattaagagtccgttgctctgccagctgagctagccacccatatttgttcatcagctcccgccgacatttaaatatattaccagtagttttataatttgacaagctttttttgaaaaaagttgaaaaataatttgaagctagcaaaaagcgcccataatggccgcttttttactaaagtttatcttgaatatgataggctgtgccttgctgatcctgcttcatgtgatctgcatagtaaacagcatagacaccgctttgatcatttttggcaatcacaatttggcgccctgttggacgttctgccttaatgatttgagcactgcggcgtgcttctttaaagtcgtgtgaagatgcgatggcatcccctggattaaaaaatacagcttcgttcattgtaaagccccctcgtacaaattctaattttattttaccaagaaagccctttctaaatccaatttaagaaacaaaaaagagataagatcaacatcttatctcttgcgaaaaatattatgggtggccaggggatcgaaccctggacccacggattaagagtccgttgctctgccagctgagctagccacccatgtcgttgaatcaatcaacagatattattatgctattgttgataagaaaatgcaagctttttttgaaaaaaaacaaaaatttttggctaatgttacaaaattcagtataatgtaagggcaaaggaggcattcccgatgccaaagaagattctcgtcgtcgacgatgaaaagccgatttctgatattatcaaatttaatttaactaaggaaggctttgatgtcgacaccgcctatgatggcgaagaagctgttaaaaaagttgacgaatacgacccggatctaatgattctggatttgatgttgcccaaaaaagatgggttggaagttgcgcgtgaagttcgtcaaacgcatgacatgccaatcatcatggtaactgctaaagatactgaaattgataaagtcttaggactggaaatgggtgcagatgactacgtaaccaagccgttttctaaccgggaattagttgcccgtgtgaaggctaacctgcgtcgtcgtgatattgttaaaaaagcagaagctgccagccaagaagagaccgataagaatattaagatcggtaacttggtcattatgccagatgcctatattgtagaaaaaaatggtaagaagattgaacttactcaccgtgaatttgaacttctttactatttagctcaacatatgggacaagttatgactcgtgaacacctgcttcagactgtttggggttatgactacttcggtgatgtgcggactgtagacgtaacggtgcaccgtttaagagaaaagattgaagataatccaatccaacctcaaattttagttacccgtcgtggtgttggctattatgtaaaacagccgagtgaagaataataaagaaagccacagaactgttatggtagtggctttcttttttatattttttagatattgaatgagtagaatgaaaaaattcaaagcaagattaaatagtacatttaattccattaatactaaaattgcaattgtgttcatgctgatgctactggcaacaattgaagttattggagcttattttacccgtcaattagagcaaaatagcattgaaaatttccaatcatcaatccagattcagactatcgtcagcaatcagttagctaatcagttgaccagtgataataaaaatactaatgatcgcttgaatcaaattgttaatgactacaataatgatgcaattagtgaaattattgttgtcgataataaggatacgattcgtgccgtttctaacttaaatgataaaagtaagatcggtcaacggattaacaatactgatgtgaagcaggttatttcaactggacatcaaattaataaagtggtcgatgatcatggcaattacatgattcaaatatcgccgttgactagtggcaatggctctaacaatactgttggtgctgtctatgttaaagctagtatgcaagatgtctttaacaatttgcgccaaatttcattgactttcttgattgcgtcattgatcgcggctttattaggtgcatttttgtcattggttatttcccgggcaattacgcaaccgatcgaagaaatgcagaaacaagcattgcatattgctgatggtgattattcaagtcaggtaaaaatttattccaatgatgaactagggcaattagctaaagcatttaataccctgtccgtacgaattgaacgctcacaagaagagtctgatagtgaacggcggcgactagatagtgttctgtcacacatgagcgatggagttctagccactgatcgtcatggtaacgtcagtgtggttaatcatatggcactaaactttttaaataaaaaagaagacgaggttatcaataagccgattgctgaagtactgggactagaagatacttcgtcacaagatttgatttctagtcaaaaagagatcgttattacccttgatccaggtacgcgggatgaaattattttgcatgctagtttttctttgattaagcgggtaactggctttgtatcagggtcagtttgtgtattacacgatgtaactgagcaacaaaagaatgaagattcacaaagacagtttgtttctaatgtctcacacgaattgagaacacctttaacaagtttgcaggcttatattgaagctcttaatgagggtgcttggaagaatccagagattgctcctaagtttttggaagttacccaacaagaaactagtcggatgattagaatgatcaatgacttgttgagtttgtctagaatggaccgtggcgtttcaaaaatggatctagaatttgttaacttaaacgattttgttaaccatattcttaaccgtttcgatatgattgttaaaacagataaaaataaagaaaagaagaaatacacaattaagcgtgaattaggcagtcaagccttatgggtggaaatcgataccgataagatgatgcaggtaattgataacattatgaacaatgcaattaagtattcacctgatggcggtgtaattactgttagaatgacccaaaaccaaaatcatgttatcttaagtatttctgaccagggcttgggtattccaagaaaagatctgggtaaaatctttgaccgcttttaccgagttgataaggcacgttcccgggcccaaggtggtaccggcttgggcttggccattgctaaagaaattgtggaagctcaccatggtaaaatttgggctgacagtagcgaaggcaaggggtctactttctatatttccttgccatatgaaccgatgacagaggaggatgattgggatgaagtttaaattcaaattcggtgaatttttcttaggcttagctacactgatcgtcattgtcctctcaattgtgctttggatctttattatgactagtgatcagcgctttagtaatattggtcagcaaaatcaaaataatatcactaaagagcaaacgcgtagtcacaattttaagtcattatatgatttatatattccaactacttcatatggttttgctaatggaaatttgtgtcagctatatgattcaaaaaataatttgactttagaatttaccaaagagataaaaaaagccaaggccactaataaaattaagaaaatagttgatactagaactaaatatgaagagtatttaaacaatcccaactatgtgcagttggtttatccagatgaaattactttctccttatttaaccagttgaataatgccgcaaatgataaccgcgagtttaaccgcttctttatctcgcagtcaaatcactggatttatttgggaaatgatcagactaatgaaatttatcaagtaaaaattgctggcgcaaattttgataaactacgtaaatatgcacgtaatgctaagagcaagtatccagttagattagttcgtttaaaggaaggctattcaccgttttacatcaagacaatgaatgctaaagtttatagttacttgactaatcatcaatcgtattcttactttgtttcgcgtttattaggtacatctggcgttactagtaagactaataagaatggtcaaacggtatattctttgaactactatactcgcttaagagtgccagattctaattcaggtgagcataattatctttatactcattatgaaaaaaataagatccccaatactactaaccgcttattagatagcgtttattatgttcaccaattgggtttaaccgagcaagatttacgcttctttgatgcagatggtgctaatgttagttatctaaactatattgaaggtattcctgttttcttaaataagcatgatttgcaagtcaagacgaccttttcaacagattcgattaatgtggcctttaatagtgtaaacttccaaattccaattccgtttgatggtcaaactaagcggttaaaaccaacccaagatgttgttgatgaattagtcaatcacggcctaaagcaggaagatattcaacgaattatcgttggttttgctgaagaaaaggattcaagtcaccatagtttgattaacttgatcccaacgtactatatcaaagcctacgatgaatggaagagcctaggtgaatgggaaaagcaagacgtatctacctaccgtgaagctgatcagttaactgttaacgaagggggaaaatagaaatggaccataaacgaatcgaatggctatttttcgttgttttctttttaattgatatttatcttggaatcgaaattctccgttctcccgttaatttaagtaacgctgataccactactcgtagcgttgctagcatccgcaatgaaatgaagtcagacaatattgatttgcccgataagatttcggatgcaccagattctggttattatttagctaccaagaatcgtgactatctctctggcaaagttagctcgctgactaatgtaaatgcccgctattctaaaagcgataatgtgctttatggtgaaccaagacaagcagtccttttgagtaaaaaacctaaggaagctttagaacaaattgaagattttaagaatgattcgaaaaatattccttatggtaaagaattcaagtatgaacctgatatgtcgagtgaagacaattatgtttttgtgcaaaactcagattatggtgaaatttatgctaactcggcccaattgaatatcaatgtaaaagataatcagattattaattttactgaaacatatatggggcaagctagtccagtgcgtgaattacagtcaaccatcagtgcttggcgtgctgtgcgtgcgatgtacactgatcgtgagttgactaataattcgcgcgtaacgcaggtaaaattaggttactccaaactgacagaagtacgtggcagcacaatcttgttgccaacttggctggtttgggtagaaaataagacaactaaaaatatcacgatgaaacgtattaatgcatatacggcacagatgctacaatcgagtacctataatgtagaaaagtagaagggacaaaaattgaaggtttccgttttagcaagcggctcgaccggcaataccagtttaatcgttacaggccagcataaaatcctgatggatgctggcatttctggtaagaaaactaaagatttgctagccgaagttggagttgatattaacgagattgatatggcctttttaagtcatgatcataccgatcatagtggcggactcggcgtgttgatgcgccgttatcctaagatagatgcttttgccaatagtgggacttggcagtatttattggatacgaaaaaaataggtaaattaccggctgaacaaatgaatacaattgaaccaggcaaaactaaaacttttggtgatgttgatattactgcctttgcaactagtcatgacgcagctgagccgcaatattatgtgtttactagtggtggtaagcgggtcgcttttttaactgatacaggttatgtatcagaagaagttgaagggacaattgaagatgctgatgcctatatgatggaatttaattatgataatatgatgctcagagatggaccatattcctgggcactgaagcagcgaattttgtcggatgtaggccatttatctaatgacgaagcagcccaggcattagttgatgtagtcacacctaaaacaaagcatatctttttagcgcatcgcagccaacataataatacggagtatttagctcacgaaacggcaaaggaaatgctgcttgagggggatgcaaatttggatgatgatgttaagattattgatacagaacctaatcagcctacaaaattagttgaaatttagcagttttcacaacattttttcatataatattcaaatttaatcggtatgattagtaaacaagatgaggggagaagcaagtatggtagaaaatcaaaataataataacaatttacaacaacctagaaaaaagaatactaatggtaaaatcattgccactgcagcgattgtcggtgtagttggtggcttgatcggtggaggcgtttcatattacgcagctgatcaaatgaataatgcatcagttaataatggtgccgctcaaactagtgtatcttcaagtagtagtaaagtttcagaaaagagtgctaagactagtggcacaatgactactgcatataatgatgtaaaaggagcggttgtttcagttattaacttaaaacgccaatcaagttctaatagtactaattcactttataatagtttattcggtaatgatgacagtgatgatagctcttcatcaagcagcaagggcaagcttgagacttacagtgaaggctcaggtgtagtctacatgaaatctaatggcaagggctatatcgttactaacaaccacgttatctcaggcagtgatgctgttcaggtaatgctagctaatggcaagacagtaaatgctaaagttgttggtaaggatagtacaactgacttagctgtgctttcaattgatgctaagtatgtgactaagacggccgaatttggcgattctaagagcttacaagctggtcaaactgtcattgccgttggttcaccattaggtagtgaatatgcttctacggtaacgcaagggattatttcagcaccggctagaaccatttctacttcatcaggcaatcaacaaacggttattcaaactgatgccgcaattaacccaggtaactcaggtggtgccttggttaactcagctggtcaagtgatcgggattaactcaatgaagttagcccaatcaagtgatggtacttctgtcgaaggaatgggctttgcaattccatcaaacgaagtagttacgattgtgaacgaattagttaagaagggtaagattacccgtccacaacttggcgtaagggtaatcgcacttcaaggtattccagaaggctacagaagccgcttgaagataaattctactttgaagagtggtatttacattgcctcagtaaacaagaatagttcagctgctaatgccggaatgaagagcggcgacgttattaccaaggttgacggcaagaagattgatgatgtggcatcgttacacagcattttatacagccataaagtcggtgataccgtaaatgttaccgtgaacagaaatggtaaggatgtcaacttaaaggtaaaacttgagggtaactaaaaatcaaaatagaagttaattaaaagaaaaaaggctatatcacgcggtttaaacgtagatatagcctttttattaactttttaaatgtgtaacatcaaattgttcggaattatttgttgtcaaacagacaccagcctgttgataagtgtggataactctgtggattgtgtataacttgataaatataggtttattaacttgtggaaaaatatgatgattttgaccttatttagtgaattctatttgagaaaacaggcgttcatgcaggtataacaagccttaagagataaagtttgtgaaaaaaggctttcataaaatcgatgtgaataaagaaattttagaaaaattattaaatacaacttctggggtataagtaaaataataccacaaaatgttgaaattggtctttgaagttttgtggaaaagtttgggtaaatagtgtggaagggatgttagtattgtgctggtagattaaaattatgaatggaaaattagctatgcttgttataatagaagcatgaatatcaaaattgtatgtgttggaaaattaaaagagaagtattttagggatgcaattgcggagtatgagaaacgactcagtcgttttgcaaaggtgtccattgtacaggtgcctgatgaaaaagcaccggaaaaattcagtgcagctgaagatgagaaggttaaagagattgaaggtcagcgaatcctgagcaaaattaaagataaggagtacgtgtatgtgactgcaattaaaggaaagcagcgcagcagcgaagagttcgctaaagagattcaggatctcgcaacttatggtcattcagacattacgtttgtcattggtggcagtttagggactagcgatgctgtaaacaagaggggaaatgacttgattagttttggtaaattgacgatgccacaccagttgatgcgcgtggtgttgattgaacaaatctatcgtgcatttatgattaactcaggtagtccttatcataagtagaatatagaaaaagcccataaattgggctttttatttttgcatatttgcagatttcacaagcatattgaaaaaaactgtggcaggtcagtgcttttttagttttttatgatttaaaaatagattttgttaaattatgtttggcaacaaaaaagacgatctttcgatcgccctgataatttttgagctaccagctagtagctcacgcacacgctgaagtgtactttatctttgtagtatctcaattttaacacataaatggtaaaattaaaactgcacgttgaaggggtagcgcccttactcgtgtggaaggaggtagactcccatgaagtattactttatctttgtagtagtatttctaccactgaatcgtgatggcaagtgcttcaagaagctcaagaaggctattaaaaagttcctcaagaacctgattgatagtttctttgattaatccgatccagactcaatacagccgtccttcggggcggctttttttatgatgaaaatggcaagtcattgggtgaaaagtattacgcatatcgtgcagtaactgtaaatcaaagtcccataacaattaatggcgctaaattctacaagttggctgatagggatgcttatattaaggtgaccaatattagtggtcaaggtcgcgttttaaagcgtaacgcctacatctacagtacatcaaaaaaacgcactacgcataacggtgcttggaagttgtacaaaggctccacagtgacaacttacggtggttcatacaagtttaagaatggcaaacgctattacagaattggcggacctgctaagcaatatgtaagaacatcaaactttaattagaagttgaatatcatttacgacagcaacataatagttgctgtttttttgcctcaaaaaccatagaaaatcttctgtaatcaaggtaaaatgaaattgattttacaaatatcatggaggatgttggaatgagaaaacgatggacagcagctgttattgctgctttagttgccgtaagtactgccgcaactactgttaaggctgacgatactaacacaacagctaatactaatgagacgcaagtaactgcaactagtgaccaaactaattctgattcagataaggttacttataacaaggcagattatttgtctgctaaccctaaattagtgcgaattaagcatgcaactactgcttataaggatgctgcattgactaaatcagcacagagcgtaaaagcaggatcacactttttaattagtcgaattgttaaatctgacaaccaagtaccaatactaaagactagtgatggcttgtatttgcctgctaaaaaatctttggtaactaaggtcatagcctaccaaaatcctaagggttatcatcaagtacattacacacaagttaaaccatacggtaaggtgggttataacttgtaccgtggctatgagggtattaagacttggaaagtaatgcatagagttggtacttgggcaggtacgaattactataaccaagctacttataacgcagtaaagaacttccaacgtagtcaccacttgccagcaactggtaatgttaacttagctacttgggaaaagatgggcttttctaagaagtcatggtatagcattgatagttatgttgccccacttaaggcttatgcttggcaagggcgtaaagctcatattgaagcaatgattaatcaagcttacaaatatatgggaaaaccatggttagcaggttgttcaactagtccaagctacggtgttgattgttctggtttggtaatgcaaggtctttatgcaggtggcattagtccagttccaactagttcaatcggccacgctcatccaggcaatgaatggaattcacgtaatctttgggctgacaagcacctaaagcgtgttccatattcacaaagacaacgtggagacttagtgttctattaccaaccaggtacgcacactatttggcatgtagctatttaccttggcaataaccgagtaattgaaagctggccaccacgtgtgatggttcaaccaattgttaattcacaaagaaatgtaattgctggtattaagcgaccatttatttaaggaaaaatatgaaaaaatatttagctattttattagtcagcctgggctttagttcattattgttaactcgccaaacagtacatgccgctgataatgatgatgccgcgacaactaatcaattggctcctaagtatactggccttaaaaaagttggtaaacattatgtctattttgatcaagcaggcaagcaacgttttaaaaataccaagactaaaaaagcatattattggattaataaaagcggcaagatagttggtattaataactacgccaaggtaattagccaactacctgaaatgccaactggttgtgaaattactgccgtgacaatgatgattaattttgctggtaaaaaggtaactaaacagcaggcggccaagattatgccgcgcagctctaaccctaacaagggctttatcggttcgccttacaagaaatatccgctcggctattgggttgctcctaatggggtgaaaccagtagtgaagcattatctcggtaaagcccagaatatgactaattgtggtttgcccgcaattaaggataagctgattaattcacacttggtggttgtttgggtagggatgtttgacggcctctctaaccatgctattaccttgacgggttaccatggtaaaacgatctattataatgatccttggactggaaccaagcggaaaatcaagcaggaaatttttgcaacgcattgggctttagatgctcatcgggcgttgagttattaattttatgtaaatatatttactttttagtcatgttgatcaagccactttcgcagcatttcaacatattcatctgttttttctacaaaagacatgtgaccgcagttttcaaatagctgccatttactgccagcaagatgatcctgcatcgttttagctacataaggtgtacataaatcatcagtcccactcgtaattagagttgggatttttattttgcctagtttttctgtgtattcgtaatcgtgcaagttgccctctggcgtatattcatttggtcctcaggcggtttcataagctacaataccaccacatttttttcgcataacgcattcaggccacgttttcgtcatgtcaattgcatgttgattcatgaagtgctcattagcttttaagtaatcaggatcgttaaaattgctagtcaattcggcgcgatgaattgccgcctgttcttcaattggcaagtatttaatcatccggtgtaattctttgctccataaggaagcagacgacaaggttgaagacaagatcaagctttgaatgccaacaggatgataatcacacatgtagattagcgctagcatcccaccccaactttgtcctaataaatgtattttgcgcaaagccaagtgctcccgcaacgccatgagttccttaacccatgtttctttagtataaagttcagggtgatcatcagggatgctactcttgccgcagcctaactggtcgtacatgataatccgtcggttatcaatttcggctaatttgtccaaaacctcaaaataattatgacttgagccgggaccaccatgtagcaatacgagtggtgtcttttcgcttcttcgaccaacaatacgatagtaagtttcatagcccatgaaaggcatttttccttcgataatttccattttttcacctatttgaacaaaaacaatgagatattaaccaaaattagcagggtaaagaagattacccaatctctagctggtaaaggaatagcgatgatcgtcgaccttctttgcccttcgacatagccatgtgattccattccttgggccagattgtcagctgaatttaaagcaacaagaattgctttaaaatagaggaccggcgaccaaaaactgagataaatgccccgcatcatagcgctagttcggatctgtttaaccgccatcttcatctgcggaataatgttaatcgccgccagcacgccgtaggcaaatttactgggtaagtgcaggttctgctctaatgatcgggcaaagtctgtagcggtgttattacgtgtcacgcaggcaatcgtcaaggtataaacatagatacgcgttgacaaattccaagcataataagcatttggtgttggtgaaaaccaaaagagcgttgcaaagattgtaaaagcagcaataaagggcaagataatgagcaagattaactctttgattttgaatcgagtaataattaaataaactagcgcgaaggtgattactaacaaattagtaactaagctagcttttaaagatatttccagggaaataataaatgctaaaagaaattttaaactaggattcataagcttatctttctacatattttaagcgctgatccgcaaaaatcaggtggtaatcgcaaaattcagctagctcgtctatctgatggctaatgataaaaaacgtctggtggagcttttgctggctttctcgcattaattctaaaacgagtttgaccgagttatggtcaagtccactgagcggttcatcaattaataaaacctgatgcttagtcattagcattaatagaatctgtaatttcttctgttggccacctgagagagaataaacaacttggtctaagtgtttggctaaacccaatttatctagccattcattgaccttttcttcagtaaaaaataaatttctatcctttttacttaattctagttcatctttgacagtcacagctaaaaattggtcgcttgctttttgaaaaatttgagctacttgtgttaaatattttctagctgagatttgagcgatttccttatttaaataagcaaaattaccagtatacggaatcattttggtcattactttaaataaagacgtcttgccaacaccattagcaccagtaattagggtagtgccagaatgcaaatttagctcattttgcttaagcaaaagcttgttttgtctaatttggacttgttttaaagtgaaaataggctcactattaggtaagacaaaatgataatgtcgctcatgcaattttttattttgttcaaataaggctatttttttgctagcatttaattcaataacttcttgattatttgtaaactcaaaaagatggtcgcagacaggttcataatcgtctaaaacgtggtcacttaaaataatagtttttccgttgtgagctaaaatcgctaattttttaatcaaaaaagcacgtgtcttaggatcacaactggcaaacggttcatctaagagcaataaatctacatccatagctattaagacagctaaagcaactctttgttgctgaccgcctgatagagtattaatcttttgatcgagaaggtctgcaatttgggtgaaagctgttgcctgatctagtcgtgtttgatactcaccttcatctaactgtaaattttctaaagcaaagacaatttcttcacgtggagttggcattgtaaactgttcagccgcattttggaacatcattgccgccttttgtccgtgcaggtccaccatacctgttagtcgccctgcatatttgggatacaaaccagcgataattttgagtaaggtagatttaccgcagccggtcggtccaattaacagagaaaaaccatggggaatttcaatatttagatgattgataataggttctttttcataagaaaaagtaagattgttaacggttactttcataagcttgattgtacaagatgctttggggactgtctacaggtagagtttgttataagtagaacaaatcataaataatacttaatactaaataaagttttgatttataatgtaattatagtgttaccatattttatttaatttaaggaaggtggacatatggcagctgttgctttggaccaatatctggcaagtgtattaaagtcaaattcaacagataagaatgaaataaagttggaagctggtaatccagattttgatctgtttactatctaccttgaaaatcataatactggtattcatcgctatcggatggatgtttcaacgattttatatattgctaagggtactgtgacaattaagagtggtgaaaagatcattcaaatgaagtctgggaatgttttgctactgactgaaggttgcaagtatgagattttaagtcaaaaacctgatacggtactgataaagttgaagtttaagcgtggatttctatatcgcaagtattttaaagattttagctgtaagggagaacgtgaggttaaagttattgagcaaatcgttgatagcttagaaaatgaacatgttctttggctaaaaaataatcaaattactcgtgcttctcaagtgatgcaacatattattggcggttatttgaataatgatttgtttactaaagctttaattcaggctgagttgaccactatgttgattatttcaattagaactcagcgcatggcaacaccgactagtttggataaaactaagtttgaaaagaagaccttagataattacatcgatcttcattttgccgatgtctctttatctgacgctgcaaaatactttggcttcaatcctaattatttctctaatatggttaaggctaagactggcaagagttttgtggatcacgtggatgatcgaagaatgcaagaagcgcgtgaattgctggctcagcctgatatttcacttagagagattattggtcgagtcggatattcgagtaagtctttcttttataagaaatttaatcaatactaccacataacaccagcagcgatgcgggcagaattgtttagacaagcaaatatcaatttaaagtaaaaaaataatctggacgaaagttccagattattttttacatattttctaagcgtttaatgcggtctgctgttggtgggtgagtatcaaacaagtgcgtcaaaccgtgattgtggaatggattttcaatatataatccagcactactactatcagctactttcattggttggctattttcaatcttgcgtaaggcagaaattaagccttgcggattacgtgttaatttaactgaagatgcatcagctaggtattcacggttacgcgataaagccatttgggctagggatgcagaaagtgggcctaagatcaacacaaagaccaaggcaaccactttaaaaattatggctaaagcattactgtcacggtcatcgtcgtcatcactgcgcacgccgccccagaaccaaaaattggacgccatattagagataaaagaaatgaccccaactaataccacggcaattgttgaaagtaaaatatcgtagtttttcacgtgtgataattcatgccctaagacgccttcgagttcttcacgatcaagtaattctaaaattccttgagtaactgccaccgcactatgttcagggtcccgaccagttgcaaaagcattgggactaggatcaggaataatatagacccgtggcattggaacctgtgccaccatcgccatatcttctacgatatgccacagttccggattgtcggcttcatgaatttcttgcgcgtgattcaagctcataatcatgttggctggattttgccacatgatgaataagtagactaaactaccgatcaaagcaatagtaacgcccattgttggactattgctccaaagataaccgattcccgcaccaactaagcctaagatcaccaaaaagatgaacataattaacgccgttttgcgtttattacgagcaatttgttggtaaagcatggttaaacttccttaaaattaaaacttaacttgaggcacattcttttcttcactaggagtttctaagtagttaatcttagtaaagtggtgccacttggcaacaatatttgatgggaaagtaagcaacttttgatcatatgttgctacagttgaattataaagttgacgagagtaagcgatcttgttttcagtgttagtcaattcttcttgcaattttaagaagttttgattagctttcaagtctgggtaggcttcagccaaagcaaaaattgacttcagagaatcagtaatttggttagaaagcttcatcgcttcttcatggttaccttgaggcacattaaccaattgattacgtaatttgactacttcctcaaaagttgatttttcatgcttggcatagcctttggtggtttcaaccaagttgggaattaagtcattccggcgcttaagttgaacgtcaatttgactccaagcttcttcagcatagactttcgctctttgtaaaccgttgtaagttactatgtagatagccacgattaaaacaataatagctaaaatgatccaaattaaaggtgacatagtttttcctccataaaatatttatttaattttatcgttttcgaatttcttgagcaataaaaaagaatgtcaaagcggcattcttaacaaaaaatattaaattctgaagattaatagtaataatccaactgcagttaaaataatcaaaccagcaaattgcataatagtccattgaataaaaaactttttcttacttacgctaccgtgttggttgaaagtcttaagaactaacatattagccattgaaccgatagcggaaccaaaaccaccaatgtttgaacccaagaataatgcttgagcataagtggtaaatttaccaactaaaatggttgatggtacattgctcattacctgactagagataattgaagcaaagtaagttgaaatttcagaataaacggtgccatgaattagatttacgataagagggatttgttggatatcgctgatgaagatgaagaagccggtaaaggtaagaagtaaggcatagtcgattttgagcataatcctaggattaattgcaagggctaatgcaaccgacgttagcatttgccaaataatatcaatggttctgaaaacaccaaagaagaagaaaataaagacagcagtagttatcagcgtcgggcgccagctgatcttgattggctcagctttttgcaccggaatttcttctttaggaataaacagaaagactaatcccatgattagcattgaaactactagataaggtacagaccattcgaaaaattttaatgggctgacatcaaagcggctgactgagaaaatattgtgggggttgccccaaggcgtaaatgctgccccaatatttgcgcccatcccaatcaaggtaacaggcaaaatctgtggcaatttataacgcttagcaatatttaaatacagtgggatcaaggtcaatgcagtaatgtcattacctaaaaacatccccgaaatgacagccaacaacgaaaacagcgtgttcaacttacgcgtattatcggcaatacttgtaagcttgtacgctaaaacatccagaacatgcaagtatgcatagatctggataatcgttaacatcgcggcaacagaccataatgtatggaagttaatgtccgcaaaccgcggtctggcaaaaaaaagactgactactgtaatgatcacagtaatctgtaaaattctatctttagcaatattctttaagacggtcataaaaggtcccccttacgtattacaatcgtctaaaaaccctatgtaccattttgagcctttttgttattgcatgcaatgataaatttaaaaaaatatcaagattagcggtatttttgagcatatttttagttagttggaactagtcgtgctatacttaaataagtaagttaataaaatttagattgaaacgaggaaacaaaatgacagagaatgcaatttcaatcaatattaaaccagatgctgcagaaatgattaaaagcaagatggatgcagatcaccaaattgttatcttggctttagatgatggttcaaccaagtattctaaaaaaggcggcacttgtactattggcgacagcttccagtttgtaatccttgctgaaaaagatcctaagtataatatttcaatcgaaaataatgctggtcttgacttgtatactgctcagccggaaacaactttctttgaaccaggtctagtggtaaatgcacgcaactcaactttgagtttatcttcagacagcggcattattgatggtgggatgaccgttacccaatatgaacctgaagcaattactgctgatgatctaaaaaacggcggtcaatgttaaaaaaataaaattaatcatagggacgagggaatgacctcgtccttttttagtatagaattaagaaagtgatttcaatgtaaggggggaagaacaatgacttttgtcaaagaaataaaagcaggtagtcgtgaattttgccaaaattggctgcggtatctgctactttttatgggattaagtttatttaatcaatttattgttattccactttttcgctatattacaacctttgttttgcaggctagtgctattccgttcgtatcttatcaaaatgtagtgacgatcattacgacgcatacggttgcctttttaattttgataattgagttgctgcttttattagtaatcttgtatgcgcaattagcttatttacttcatggcgtttgggatattaagcatcaagtttttacgtggaaaaatagttttattcaaacttggcaaaatatcaaaaaaattcgtttgggcacgctttttattttgatgctctattttttattggtagtaccgttagccgatgtcatctttagaacaccacttttaagcaaagtgcagatttcagaatttatcttggattatctgacgagaacgccaatcttgttagccgttttgattgcgttttatttagccgctttgatccttggtgcaaggctagtatttgctttacccatcatcgtttttgaccacttaaagtcagtgcaagcagtaaaaagaagttggcgattaacggcgcactaccgttggcggacgatttgctggaggattattgttttagccgttttatctgcagcagtcatgacaattttctatttagcaatgtattgcctgcagctattagttgatttattacctgggaaatgtccgttaattttagccattatcaatctttcgcttgttcaaattattagtgaagtagcgttagtctatgttagtgtactgggcttatctattattttgaaagctttaaggcaagaaaagataagtcaaacaggtaaaactaaaaagataattctaagtacattagttgtgtttgtactagtaatgattaatgcaatatccaccaattatttatatttgactagtgtaaatgctaaagcgccagtaattatttctcatcgcggcgttgatgataaaaatggcgtacaaaacacgttacagtcattaagaaaaacggctaaagaaaagccaaactacgttgaaattgatgttcatgaaactaaggataaaaaatttatcgtaattcatgatgagaatttattgaagctaacgggagttaataaagccccgaatgatttaactttacggcaattagaaaagttaactgccaaagaagacggctatcatgctaagttagttagctttgatcaatatcttgaggaagccaaaagactgcatcaaaaattgctaattgaaattaaaacgacggctaaagattcgaagaaaatgctgcagtgctttaatcaaaaatatggcaaaacgattcttaaaaatgcgtatcaaggacaatcactcgactatcgcgtggttgaaggactgcacttaattaatccacgtttggttgtcttttacattcaaccttataattttacttatccgcaaagtgttgctagtggatattcaatggaatattctaccttgaattcagactttatttggcaagcccatttgcaggatcgtcctgtttatgcctggacagttaatgacgaaaaattaatgaagaagatgatgtatcaacaagttgatggcttaattactgatcgagttgatttagctaaaaaggcaattaaaagtttccaaaaagatgctagttatgctacgcgaatcttaaattatattgttgtcctgcatctgtcgaaaaattttgaatctgcatgaagacttgatctgaagggctggacatggtaaactatactagattttcgaaaatctgaaaggaagtatagcatatgcgtaaaggtgaaaattacaacactggttgtgaaccaaaccaaagacctaagaacaagagaaacgcaaagaagcgtgttgctcacgtagcagcagttgttgctttcttgaacaaggccgcaaaagatgaaaacaagtagtctttaataatattgaaataaaagctaggagctgacgcctctagctttttttgtgcttactgaaaaaattaattctaagtgtataattttttacggtaagttgaataaataattaaaaaagcccaagtcctttgaatttggacttgagctcaaacaaaaagaccagtagtctgatgttaagaacaaaaaacacattagaagctggtcttttatgaattcaattgtaactgaaatcgcaaatattataaagtctgaagataattatattaagcgtgaaagaaaaataatctgtttcttcttaaacctgattaaggaaatcatggccttggctttagctaaagttgatgatgaaatgattaccaaggttaaagcacagcaagttcttagttaaaatcacgccacttaagcgttacccaaaagttacgttagttgtaccagctcataatgaagaattagttattagtaaaactacgcaggcaattttaaatttgaattatccggctgataagttacaaattttaatctatgctgataattgtactgatgatactgctaaaattgcccgggaaataatcaagcaatatcctgaacggaaaatcaatgttcaagtaattgaacgaacaggtagtggtggcaaagctggtgtattaaatgatgctttgaagattgcccaaggagaataccttggtgtatatgatgcagatgccatgccagaagaaaatgctttgtattttttaattaaaaagattttggaaaatccggtgagatataaggctgcttttggtcgcaataagacgagaaatgcgcggcagaattttttaactaagtgtatcaatcaggaaattgttgttacccagcgaattcaacactgcggtgtctggcaattatttaagattggtcgtattccagggactaactttattattaatactgattatgtcagatcaattggcggctggcgcaatggcgctttgaccgaagatactgatatttcttttaaaattatgggctcaggtagtttgattgccttagcctataattctgaagccttccagcaagaaccagaacgcttaaaagattattatttccagcgcttgcgttgggctaaaggtaactatgaagtggtgatcaataatttttgccatctttttgataaaagcaactggcgggttaaattagagactgtctattattcctgcacttttttctggtttaatttggcgattgttttatcagatctgatctttttttctaatttgattgccttaatcgtccatctttggaatcctgcagtagtaataccatttacaatttcgcggagtaatattttattagctcaaattctgctctttaattggctattgatggttttgctttatattttgcaaattaacctagcgatgactacgcaatatgggcaggcaactgacgaacagatttggctagccttagcatcatattttacttattcgcaattgttcatcattgtatcaattcatgcggttacttcagtaatgctagatcgcgtttttcatcgtgatagtactaaatgggttaagactaagagatttgcggattaggtgatgagatgaaaaaaagatggatgctactaggatttttactcgtaacgattgcatttaccggtattatgatctatatcagagcagataataattcagcggtgcgtaatttttttctacattcttggcataaaaattatgtagttgaagaaaagaatcttgcctatattaataccacgcctaagcaggaacaagtgacggttttatctgaaggccaaggatatgggatgtttattgcggcgcatgatccagcagttaaagaaagcaactttgctaagctagtgcagtattatttaaaacaccgggatcgtaatacgcaattgatggcttggcggcaaacaaagaaaaatggaaaatggagcagtgaacgcaatagcgctactgatggggacttatttattgctaaagctttgtttttagcggctaaaagatggaaaaccccagcatatcagcggcaagggcaaaaattaattgccgatattttgcgttatgaatataatccgacaacgcacgctttaacggtgggcaattgggccgattctaagtcgaagtattataatttaatgcggacttcagatgtattgccgacaatgtttgatcaattttatcgtgaaagcaatgattcgcggtggctcttaattaaaaaaacaatgctcaagcggctcaatcagttgagtcaccagcataagagtggcctagttccagactttgcctggctgacatcaaaagatgctaagccagttaaaggaagggttaccactgatcgatatgatggtgattattatgccaatgcttgccgggtgccaatggatttagcatttagtaaggataaattagcaaagaatactgtacatcgcttgcttaaattttttagcaagcaaaatacaattacagcaggctatactttaaaaggcaagccggtcaataattatcaatcagctagctttagcgcgccaatttatattgcggtgaatgaaaatcgcaatcaaggctatgataatttgtttgcttcgcagcaatatatttttgctaaaaaattacctaaaaataattactatgatgcagcactaacgacgatggcaacgatactgacaccggcgcatagattttaagaggcaaaggcctctttttatttgcattgaaaatcaatctttgataacatagtaaaaattttaaggaaaatgaggaggacaaaaaatgggattaaatgcatacattcaaggttttaacagtttagagtcaattgatcgagcaccgggctacttcaagtatcatcaccactcagtagctgaccactgcttcagaacagcggaattagcacaaatgatgggagatattgaagaagtaaagggcaaaaagaagatcaactggaaggctttatatgaaaagagcttgaatcacgattatactgaacgtttcatcggtgatattaagacacctgttaaatacgctactcctcaacttagaaagatgattggtgacgttgaagaaacaatgaccactaagttcattaaggatgagattccagaagaatttcaagaaatttatactaaacgtctctcagaaggcaaagatgatactttagagggtaaaattttatcaatctgtgataaattagatttgttatatgaagcttatggagaaatcgaattaggtaatcctaacccggtttatatgcaaatgttcaaggaaagtcttgaaacgatcaagaagttcgacgatttagtttgcgtacaatactttattaagaaaattttgccagatctttttaaaggtgatttcgcgggaaaggataagatgcaacgaatagcttttagcattctattgttaggggatgattaggtgaaatttcaatgtagttcatgcgggctgcgcatggactctttgcattttaagcaagaggggttaatgaatcctaagttgaccagtatttgcgacatttgtatcacgcgcaacctgaatccagaagattacgcaaatgatgcggtcgcagcttttgctcaaagcttgctttacacgtttgtcggtgcaaagaaacaagatcaatcaggttttattgtgaaaaataaaaaggaccgtaaaaaatacgaggcctttttacaagattatgatggcaatgaaatcgcccgccaacagattaaaaggtctgatttgaatttggcggtaattaaaagcgaagatggcaagcttaattatgtgcctaaccaaggcgtaacttttgagcaaaatttaaagggaatgggtttggagatcaatttccagttaaacgaagttgattttattgatcgtgaacgcattcgggccaagtataaataccgctgccaatattgcggcagacgtggccacagcgtagatcataaggatcccgtttctcttagtcacaacaacagcttagataatttaactttagcttgtgcggaatgcaaccgaattaagtcggatatgccttataagttgtttattcaactgaatgatcaaatttctgagatcaataaaaagctagttaagtatgaagatgcgctgggtactttgagagaagaatttgagcatcgtcggcgctatttagcggctcaagtacaccttaagggtgttatcaatgatcctgagctaaatgcgattagaaagcaaaataagagcttacaggatgacattgatagtttacaaagtgattatgatgatttgcgtcaaacgcgcaagacgtattttgatacgggctggaaattagctcgcattaaggaaaataaggatattatttaaaacgtaaaaaagcgctattttttgtaaactcaattcaaaataaaaaatgagttttaaaaagatcatccccatataggaatgatctttttaatttttatctatctaattcgatcttctggatcaaataaatatttgtcccatttaacttcattttgaacagtagggtggaagagcaagaatgctagcaacagttgaccaacgtaaggaattacgcccagccaccaccaaccaccgttaaagcctgcgtcgtgcagacgacgaacagtgtgacctaattgtgctaaaaaggcccaaatagctgctgcaataaagaaaataataaaaatgatgaagattacaccgattaccttggcatcgccagaatcaaattcagtaacgctgaaaggagctaaaagcatgaaagcaagtaggtaacaagcaaatacgccgattgtcatgataacttggctaattgcagtacctacccagaatgaggttctagtagatctagcatcccacttaaagcagtcaaagaagtgttccttcaagatttgaccaatagttggtacaggaacattactttttgcgccacccttaggataatcttgatcgctgaacaagtatttgccccacttaacttggcgttgaacagatggctgcaattcaagataaaataaaaacattgcgccataaccagtgaaggcagcccagtaccaatagccgctgtagccaacatcgtgcaaacgtcggatcgtttgtcctaatgcagctaaaaatagccacagataaacaacagccgcaacaataccatcgactattctaatgccggggttgatgttttggttaaaagcatagaagccaagaaggatgcataagatgccgataacaagattaatcaaagtgctccaccagaaagatttacgcgtagttcttgctttccagttgaagggatgcaaataagcctcgttcaaaatttgcgcaaaactttctgcaggcggcagtggcagactttcgtcataaggcttgataaaataatatactctatcattcattttacttcctccaaaaattaatttgttataaattatacgctaaaaaagccgtgaagcaattaaacttcgcggcttttttgatattagaattcattatttctaaagttgctcaagaacttttgcgtcttttcattcttaggatggtcgaataattcttccggtgaaccttgttcagtaatgataccgtcactgatgaacaatacgcgatcagaaatactcttggcaaagcccatttcgtgggtaacgatcaccatcgtcaaaccggttgtagcaagcttttgcataacgtctagtacttcgccaaccatttctgggtcaagggcactagttggttcgtcgaacaataaaacttctggattcattgaaatcgcacgggcaatagctacacgctgctgctgaccaccagataattgttgtggcttagccttaatgaaaggatccatgccaaccttttctaggtttttcatggcaatcttgcgtgcttcatctttagaacgtttcaagactaattcttgaccgaccatgcagttttctaaaacatttttattttcgaatagatcaaactgttggaaaaccataccaacctttgatctaaaggtattgcggttatagccgggatgcaagatatttttaccgtgaaaatcgatctcgccgccagttggttcttcaagcaggttgatacaacgcaaagtagttgatttaccaccaccagaaggaccaatgatcgttacgatttcgcctttattgatgtcaaaggaaatatcctttaatacttggtgatttccataagacttttgcatgtgctttaagcttaaaattacttcgtttgattcagtcattaattatttgcctccgcatcttttggagtaccaacttggacttggttagccatcaagttgtaattcttattaccttcaagtctcttttcgataaagttgaagattctagtaatagtaaaggttaagatcaagtaaattgctgaaatcattaagtaagttgggaagaacttgaatgattgactggcaatagtagtaccaacgaagaacaattcagaaactgagatgatactcaatactgaagtatccttgatgttaacgataaattcgttggtgattgatggtaaacagtttctaatagcttgaggcaagatgatatgccacattctttggttgtgggtcataccaagtgcactagctgcttcgaattgaccttctggagttgaaataataccaccacggataacctcagctaagtaagcaccagtgttaattgacacaataatcaaagcagctacagttctatttaaattcaagtgccagaattgggcaataccatagtagattacggctgcttgaaccatcattggtgtaccacggaagatttctacataaacagataataaccacttaactacgttcaaagtccaacgcttgccgcgagtagttggagtaggaatggtacgaataattcctacaagcaagccgataaagaaaccaacaatggtaccaactaaagctaaaagcaaggtcatgccaatacctgacataatcatgccaccatattgcttccaagtagtaactagccagttttctttcttagtttcgttaccagccttaggttgttccttgatggcttgtgacattaattgatcacgctttttattagaaatagttcttaaagtagcgttaacttcatttaaaagcttggtattaccctttttaaccccgatactagttacggaatcgtcatggtcaactttgaagccagccattttgtttaagttaactgcaataatgttagggttaacgttgtggtaactttcaaattcaatatcttcagcaacataaccatcaatggtgccagaagctaaactttgacgcatggctgaaaagtcacgcatagctggttctcttttagcaccttttaattgcttgattaaatcgtagtgcaaagttccttgttgtgcggttaacttggcacctttgaaatcagtcaacttcttagcattagaatatttacttgccttattagtaattacgacgaaagtacttttacgataaggttctgagaaattaattgccttgcgtctttcggcagtaggagacataccagcaataattaagtcaattttacctgaagttaaagctggtaaaaggccatcccattgagtcttttctacgattacttttttgtgtagtcgtttaccgatgatcttggcaatttgaacatcataaccattagcataggagttagaaccatcaattggaacagctccattagctttggtgggctgagtccagttgtatggaggatagtttgcctccatacctatctttaacgtgccagaatctttcttagcagcttgagtctgattgctactaagagaaaaaccgataaataaactgagtaggacagacattattacagccatccatctaaatcttgacttcaattataaaacctccaaaaatagttttaacataaagccaacacaataaagagtaaacaaaaacctcgctcttccaaagaattgcgagggtcataatcatcagtgtttaaaccaaatcttatagcgctccctggggactaaccaggacagtctatagaatattcttctatagcccaacagattaacacgcgaatattaaatctatttcggcggcaaccctaagttaactatcattgttttcgcgaactcaaacttaacttgtgattgtcgcaacctctattgcattggaaaaatatttaactaatgaagaatactagaagaaaaagttaaatttgtcaagcccaaccattattagtttcataatttctctttttcatatcagaaacataaggatttcctgctacataaaaacgtaatttcttgttagcccaaacgggatcagattgattgataccaacacgcgctgcagcaattatttcctggggaatttttttatgacgatcatcaagatcaatggcgaaaggggagtctgataaaaagtgcaaattccaattcttatcatgaataccaaaagcttgcatcatttttgcgggaccattagtcaaaagaacgccatctttaccatgacggttcttgatcatggtctcaattcctaaagtgggatcgattgcacggattaaaacaccctgtggttcattctgaaccttagtggcaacatcaaagaaaaaatattgacgttgcgcgtagatatagatcgttccgcctttgccgtaaagtccttcattcgctgggctacgacgaccgccataagaatgtgcagcgcgatcctttttacccatatatgcttctgcttccacgatatagccgcctaatttttcttgaccattatcaaaagtaagcattcgcccaatcaggtcttttgcaatataatcggtagtgttagtagaaaaataagttgaataattcatttttgacctttctagaaaagagataaaaaataatgacagaaattaaattagttcgaatttatgaccatgagcaacctgctggttatcggattttagttgaccgtttatggccacggggaatgagcaaagttaaggccgatttagctgaatgggataaacaaattggccctagtaaggaattgcgtcagtggtttaatcatgaagatgaaaaattccctaagtttaagcaaaagtatattgaagaacttaatcataatgattatacagcggaatttttgcaagatgtaaagaagcatttggctaaagaagatgttcttttcttatttggtgccaaaaataaagagcacaaccaagcagttgtactcaaagaatatgtattaaatacgctaaacagttaaatatgtttgtgaccgtgttttttaactttccaaaagtggaagagaattgtcaaaattaagatcgcaaagacaataattgcaaaaacggtgtttggcaactcaaatctcaatggtggcagagctagtagcaattttaaagcgatgattcctatcaataagtaagccattggctgcaattctggaataatatccattaatttaatgataatttcggcaactcctctcatacagagaatgccgatcatgccaccgattaaaacaacaacggggttatcagacacggctaaagcagctaaaacagaatcaattgaaaagacgatatccattgattcaattgaaataaccgtacgccagaaaagagatagcacatgtctctttttctttttgcctttgtggcgagctgcttcgcgctcttctttttctttctcatgttcggcagcttgtttagggtggcgttgatcatagaagaatttaaaggctaggtaaaaaagataaatactaccagctaatttaatctcccaaaagttgatcagataagtcccgattccgataacaataaagcggaataaataagcaccccacaagccataaaccaaggacttgcgttgttcagctttattaggtagcacctgtgtctgtgcggccaaaacgacagcattgtcgactgataacaagcattccatcaagattaaagtcagaatgatcatccagtctttgccactggttaggacatgtaaccagttattgccgtcaaaaaagggtgcatatagtttaagaattgacatgtagttgcttcttttctaatttaattaatctgattttttctttttgtcccagacgataagtcccaactttattgttggataaaataactctttggtcaggaataaaaatcaaaacagggtttaatgctacggcgtgtgcaactgagcgagaagatgtggcttcggctagtgaattggcgacgtcaccataagttaacgtcacaccataaggaatatgctgggcaacggctaatacctttcgttgaaattcagtgccgaattccgaaatatcaataggaacatcaaaattctttctgataccagcaaaatattcctttaattgtttgatatgaggtgccatctttttagggtcccgcaccaacatgcggtgagggtagaagctaaaaataggtgaaacagtttcatctcctttaagtccgacgtaagttaggccggcttctgaagctgttaaaaagtaggtccatggctcaattgtaacgtaatcatagtaaaaaaactctgtcatgtgtaacatctttattaaaaataattagtctaagaataacaaactaggaaagttaattcaaattctggaatgctgttaatgcatccccaattatttgcgtgacaccaggggtaggaatttctgtcttgttgatagagtaaattttggcgtcttctttgcgataagccaagagctgggcaaaaggataaactacaaaactcgtcccacaaatgatgatcaagtctgatttttgcattatttcaacggactggtttaatactttcggatcaatgccttcgccgtataacacaataccggggcgaataattccgccacaatctttgtgtaaatagcttttagcatattcttcataagaaacaggttgatgacatttagtacaataaatattatataaattgccatgaaattctgttacatgttgattgccagccttagtatccaaagtatcgatattttgggtaattaaattacctttttcattacaaaaatgggcgattttttcatggattaagtttggtttagcagtaggaaagtacatattgttcatgacaaattcatggaaaaattcaggtcgattgaatagcgtactatcgctcagtatagtttcgggactttcttgcacgccatcatagattccgtttttagagcggtagtcagggatacctgagtgggtagaaacaccagctccagttaagaatacaatatgttgggcattattaatatctgtttgtaattctgctaaatccatcatataatgtcaccctccgtgaaagtcactactttaattataaatcattgttttgttataatgactgaaaattgaaagcaccaaaatcaagctcaagtcctgtcactattgagctttcttagacgtaattagtttttatatgatctgtttcagtgcaatttgtatgaatcgtggcagttggttaataaagtcattgattacttcatctatcttttcaaaactattctgtttaagctcttttaattctgaaattaagtagaccaatgcatctacgaatctaatatcaggtaaggattcgttcattagatagaataaatctccgattgtcttatcatctgtattttgtctttcctgccaggtcaatagatcataagttattgctgtaactgcgatatagccacattggccatcatagctttgaacttgagatttatctaaagcaagatattgcttagacgtcttaaaatatgtttcaatttgccatctacgaccataaagttggatgatttcttcagggctaagctttgtctgagtagtagctaaaaccaaatacttgttcttgtttccacggttggagacaaagacgagctttaataaaaagctatgtccatgatattgagcctcaactatgcttgaataaagataatgtttctttttacggatgtttgaagcagccaaacgatcatacaagtctttaacgctatagcggcgatggcgataaatgtaataaatctttgaactcttcttgatcatgccaagtccatctaaaccgatcttctttaaaatccaaaacattcttggagaagaaaaccaagaatcgaataagacgtatttagcttctactcctaatcgtaaggcttgtctaatcaactctacagttacatcattcatctttctctgagcttgatttctccttttaccagaaattgaacgttcatcagcagtaatgggagcagctccaatcatatttttcttggttttggttgacatcaaggcaaagttaaccggcaagaaggtattgccatcgctccagcctaaagttaaaccacgatatccgttccaatactcatgcttgtcatggtcatagactttagctagcaattcggtctttttagaaaaagaccgagccatcagcgtatcgtcaacgataaaagcaagtcggcgtcttttatcgataaatagttttaagcagccaatgagccgggctgcaatcaagcataatagtttttgccagttgattcttccatcgttaagtacattgcgagcagttctaacggaaaaacgtttgtcatccttagctctgaataaagaaagccgagcaaaatgtactgacatcagccaagagataatcatggttaatgaaacggtggatttacgcttaaaattgacttgtttagttaacttagctagaccaattagattaataaatgaagaaattaaggatttagtatcattttctgtgtcgatttgttctatactgttcattgcgcaggatctcctttactttttaggtcgacacttaaagtataacgcagagagagcctgcgtttttatttttgataagaaaaagccaagaggcgcggggaaggagcgttaatcttagctttcaagtttcagtataatgattaaaataactaaattgaggggatttttatgaaatatatgacgtatttttatgtagcaattgatattttattagtagtttatgcttgttatagttggtattggcaagctaaagttgattttcgtggtcgctatcgtatctcctcagttgtttgggcgctaatttttatctggctgggctttacatggaattacattgaaaaaggtgatccaggcctgagcgtcttcttggctctttttatcttaattagtattgtcgatggtttttcaggatttagtaaaaagcggatggtcgtttcaggctacttcaagcgtacagttaagtatgatgatttagccagcgctactttaatccagatccccaaccaagagaagccattagtgatggcgatttttcgaactagcgatggtaaggcttatatgatgcgctttaataatgaagttaatagcgtaattaagcaattacaagaatatgctggtcgagaaattcctgtcgaagttcaatcaatgatgtaattacaaaattggagaaagcattcgcgagaatgcctgcaaagtccgcaatgcgcgactttgcttttttatttcttccttagttagtaaatgcgagtgtttcatatcttcttcaaaagctgccaccattttctggttgaactttttatcataaaaaacggcattatcttcaaagtttaagttgtaagaacggaaatcttgattcattgaaccaactgaagaaaaatggtcgtcgacaatcgtcgttttggcatgtaaaaagccatcttcgtagatataaattttgacacccaagcgagttaattcgttggcataccactgtgtggcgcgataaataaaggggtggtctggcttacatgggatcataattcgtacgtcaacacccgatgaggcaattgtttgccacgtagcaaaaacggcatcatcagggattaagtatggtgtttgaatccataaccgtttgcgtgccaaaagcattagccgcatcataccgttacgcatatatggtgcataacgatcaggcccgtctgaaatgatttgcgttgcaacgtcgccttcgtggatgtttttttcatcaagatcaggaaatagagtggaattgaaacgtatgagctgttgattattagtgatagaggcattccagtccatgacgaaacgctcttgcaaaagcagagaggcagaaccaacaattcttacctgactatcacgccaatgaccaaacttcttttttttgcctaaatattgatcaccaatattaaaaccgccagtccaagaaattcgcccgtcgatgacaacaatcttgcggtgcaagtggtagttaatgcggtaacgggtgatcatgttgcgtgaagtgacaaaaggcaaaacttccccgccagctgcccgcaattgatcgaaccatgctttagtagctcccattgaaccccaggcatcataaattacgcgtactttaactccttgttttgcttttttaatcaatagttgcaaaacacgattgccgatattgtcgctataaaaagtgtagaactcaacattgattatttccttagctcgtaccatgtccttaagcatgtcatgaaagaaggtttcaccttcggtatagagcttgacctgattatttttagttaggggagcttcttgttgatggttaaaaaagttaattgctatattaccagcctttgaagtgtcagaaggactagtatttttaggtgctttagcaatcgatttttgaacatttctcaagccaatgtgtttttgcttattgatggcaaaaatattttcctgggaaataccccgaccaaagaaggcataaagagtaatcccgactactggtaatactaacaggatgattaaccaagcccaagtggttgaaacggatcttctacggtggaagacaacgtagaaggctaagattgtgttggtaatgataatgattctaacaaagtcatgccaccagatcataaactcctccaaaattaaactacttttttaatttaagaaacttgtcaataatatcgattacaaacggattgtcatgcatccaactatgttcggcgtcatctttaccgcgtacttctacttcttgataaaaatgtgcttttggggcaacgatatagcgaatgctttttgcggaaacaacagagatgaatttatcagtatttgtgttatctaaaacgttgccataaatattcaagaccgagatatcaggattgaatttgcgccgattaaaaaacaaataaaggtagtgcgggttcatgacactaggccgaccactttcggtcaaatagttgacgtttgggatatcgcccaagtaagtgaccccgtcaaaaggaccagcgataaaggcacatttttttaaatgtgggaacgttttgctgcggtagtgcttcatttcagtgcgaataatacatggacaggctaatgaatgagcgactgcaatatagtttttaaaaccatatcttttagctaaaaagggcaggacgaagttgagataatagtcgatgccatagataccgactattcgctggcgaaaagcaacctgcacgataggatgcttgtcactagtccaagttccttctaatttgaaatttcctaataaatcaacggttacctttaaaaacttgggattgcccttgtcataagtagcgtgtttcaccatcacgcgagtggtataatcaccgccgcgaaagccatggaaataaataatgggtacttgttttagatcgcttttttcaatgttttccttattttcaatatggcgcttgtgtaatttgaggaaaattcgcgtgggagcgaaggtggccatcagccccaaagaaatcatgttaaacatgctaggttcttcttggaggtcatgtttatgatctttttcaacttcttcagcatatttttttgtgttgaaaaacatttttaccaccttctctttcttttttcctataataaaagttatgcaataagtatattttaccattgggtaaagattttggaattttagaggtagaaatgaagttttatgcagtcaaaaaaggacgtactccgggaatatatcggacttgggatgcagccaaagaacaagttgatggcttctctggtgcagaatataagtcatttgaacaaattaccgatgctacagattacttagattggaatgcccaaactcagagcgatgtcctgcaaaaaggtgaagataatttacaaaacgccgtaaaaagggtgcaacaaaagagtcaagaaataaaaaaagcaccgcgaaaaaaggcgaagcagtataaccatgttaatagcaatcctgctgacttctttgcggtgacttatactgatggtggcacgcgcaatactggtgtttataagggcggtcacgttaaaaagaccgataaagcagcctgggcttatttaattgaatgggatgaccagaaagttcatggctccggtggtgaatatggtgctactaacaataagatggagcagacagcattgattaatgcactaaaaaagctgcttgagcttggttttaacgataaacatctattatttgttcttgattcgcagtatgtgttgaatgcgattaataagcattggctacaaggctggaaaaaacgtggttggagacgttcttctggaccattggctaatgtggcggaatggcaggaattagatcggttattaaaggaatttcctgatagtacgtttgaatggacgaaaggtcacgctaataatcgcggtaatgaatttgtcgatcatgaattgaaccgttatatggatcaaaaaatgtaagaaaaaaggctacactgtagccttttttaatttaaaataacgccgccgaacaaaccactaaagaacttaacgatttgatcccacaaattttgtaaccagttgcggttttcttgggtattaaatttattgaagatatttttagctccattttgaatctgactggataatttcgaagcctgttgcttgaagttaccgtccttcaatgcccctgaatcacgaatttcaattagaagattgacaatttgatttttttgattgttgttgatggtgtcacctaagtggttaatattaatttgattgttgacaatgtcgcgaatttgactgtcggtaatgttttgcccttgtttagccatctcattcttggcaccggcaaccgcattgttcaattgagcatctgaataaccttttttgtttttattatcttgggtaatcccagacaaggtattcatttcatcttgagcggcattaacttgcttttgatttaatgcattgccatttttagcataggcagcataaactccagctaatgcccctgaaccatcaattggaatagcgctagtaacataaatgttggcatcgctgatgccggcggtcagggctgcgtttttgtactggttggcagtaatagtcgtgatattatttttaccatcgtagtctaaaattttaacgttgattccgctgcctgagctggtcttttggatcatcgcactggaccaaacaccggatgaagtggtgaaattatcaccagagggatttaaatatttaaccagatctgagccggtaacagtaattgtttgataattaccaccgtttagtggggcggttaaggtctttaatgtgccttgcttttgcgcatcagttaatgatgtacctaaggtaactacaggtgtatcatcatctgctaatactggcttagtaaatgagatcatcgcgaccacgcttaataacattgctgtgagtagtgtgataaatttcttcattttttcttcttttcttcctttttgatcgaatatttattcttgtaatacggaacattatactaaatatttttcaaaagtgaattaaacaacacgtaaaactttcttaatttcgaccttattattgaagatggtataataaagagcaacaaagggggacaatatgttacaagtgcctaagttaaccatcatcatgcctgtttataacacggcgcaatacttgccacgtgcttttgatgctctgcttaatcaagttgacaagagcttcaaattgcttgtagtagatgatggctcaacagataattcggttaaggtagccgaaagctatgccaatcgttttccatattttaaaataattaaaaagaaaaatggcggcccatccgatgcacgtaatgttgggatgcagtatcttgacacaccatatgtcacctttcatgatggtgatgattgggtggatccaggctacacatccttttttattcatgcttttgaaagtcatccagatgtcagcttagtatcatgtggctattggatggattatcctgacaaaaagcaacgcgttgttggtcgaccagaaggtggctatttaacgcgcggtgaaacttatttgaagttgactaatgtctttagctcaccaatgaaaggatatagctggaacaaggcctataaaactgccattattaagaaatatcatttgaagtttgatagggatatttcactactggaagatcagatttttaacgttaaatatatttctgtggctaaaggcgtctactacacgcaaaaaccttattaccactactggcagagaaagggcagtattattcaccagcctaatattaaaaaagttgcggataatttccggggaaattaccgggtttggagcaaaattatcagtacaatgatgaaagaccgcgaggaagaaaagatgcgtaagaagttagagcgacagcaggccttgcgtgatagtgaataggggaaaacatgaaagaaaaagttaatggagtcgaaatttattatcataagttaggtaaaggtgagcctttgcttttactacatggacatcacttagatggtggtatgtttgataaaattgtggctccgctttctctttattacaccgtttacgtgcttgatatgcggggccacggccttagtgaaggcgacattgcggaacactacaagaccgaagtagaagacgtctatgcctttgttaaacaggttggcattgaaggctgctattgcttcggttttgatgcaggtggtctggtggcaatgatgctagctagaaaacatccaacgatctttaagaagatgattgtagctggcgttttcgttaatggtgcaggcattagaccatatcactacttaacggaaggctttcatcgctttttgagacttgatcgtgacagccgcgtagagttgactgagtcctttatttcagtagatgacttgaagaagattactacgccaactctttgtgtagtaggtgaaaaagactgggttaaggttgagcatgtacgttggtatagccaatttatgcccaatgcgcggttggtgattatgccacggcagacgcatgacagttatgcagtgcgcagtttaaaactgctggatttgattaaaggattttgtaggtaatacgcgtggtgctagttaaatcgttctaggcaatatgccatattataagctaaaatggctatttctagccgctgctgaaagccagctaagctccttgctcggttattttcagcgttatagtaactgagcaaagaaaagtcgctttcaattgttcttctaattgccatcagttgatgattattatgttttttagcacctttcatgttttttcgatatggtgtccaaaggacatagcccataccttttaactcggcagctaagtcttttcctaagtagccttcatcgcctaaaagataatggttaattggatgagcattaatcatcaattctgtcgtttctttggcatcatgcactgatgctttagtgactgcgtagtcaagcaaatagccatcatcgcttactagcgcgtgcaccttgaaaccataataatagactttcttggttgctttatagccaatatcggctatgtcacggaagatcttaacacgataattacgaacaggctgacaaactggaacaggaaaactgtcaataattaaaaattctccagcaacctttacctcttgattccaagcttgacggatgcagcgaattaaaggcaaaagcatcttggctcgacgattaaagcgagaatgagataagccaacaaaaaatttacagaatcttctttgggattcaattccaatttcagtttgccaaatgagcatcgctaagatggagctgtcggaaagctttgtttgatcaatgttttttcgatgcgtaagcttatcaggcgcataaagattatatagtgaacgacaaattacatttaaacgactaaaactaacttgtaaatggtgagagaaacgattaagcttgaggtagttcaattagatcagactcttttctatttaatttacttacaacttgagtctaatccgattggacttttttattaactaaaacgatttaactagcaccacgcgtaggtaatgtggatagtattgctggttaacgtgatagttgctgcagttgctgttatatttggttttcaaaatagggtagaaacattaaatctgttcaatgccggtatagtttttatcacttttgggattgttttacttttaggtgcaattcctgtttatcaagatttcagcacgtcatcaattttaatgttcattgcaggcattttaattattgttagaattattatgctagctgttagtttaattaccaaagtgccaagaacagtaaatctacaggatattgcaatttcattgatgatcgctgcagtttgtttgatatatttcatgcacggtttaaatctgagcttaagtaatttagtcgtgccagaattagcattgattattggcattattttgttttattttaaaagaaagcgtcaataaaattgattgcaaacatggacatctcttcaatagaggtgcctttttgtatataatggtggtgtatacgatttttattcagaagaggtaaataatgaacaaggaagaacttcatcaattattgcacccaatgaaagttattggcttaggtggtaaccctgcattaaatgaaaaaattgcggcaattttacaccaaccattgatcgaaactgcggttcaccactttagcgatggtgaaatccaagttaacattggtgaatctgtcagaggttgtgatgttttcgtaattcaatctatccaagatccagttaacgaaaactttatggaacttgaaattgttttggacgcacttcaacgtgcatcagctcatataattaacgtggttgtaccatacttggcatattcacgttcagataccaagactcgttcacgtgaaccaattaccgctaagttagtggctaacttgcttcaattgactggcatggatcgtttaattactgttgatctacatgcctcacaaattcaaggtttctacaatatccctgttgatcacttacatgccattccacttcttggtcaatacttcttagataacggaattgctaccaaggaagatgatgatatcgttgtagtctcacctgatcactcaggcgctaagcttgctcgtaactttggtcaatacttcaatgcaccgattgcaattgttgatcaaagaggtgctcgctatgatactgaggtccacgacatgattggtgatgttaaggacaaaaagtgtatcatcattgatgatttgattgatacaggttcacgtatttcttcatcaactaagtcagttttggcagctggtgctaagaaagtttacgttgccgcaacccacgcacttctttctaagaatgctactggagtacttaatgaattaccaattgagcaaatcgtagttactgataccattaagcacaagcgctacccagacagaatggtcagaatttccgtagaccaattgcttgctcgtggtatcgattatgtatacaatgatcgttcaatccaccaaatctttgacgaacaaaaccgtttaaagtaaaattcttattgataatttgaataaaaaatgatcctcactatgaggattattttttattcaaaaaatcgggtagataagttataaaactatgtctaaatagtaatgattgatataattgatatgtgttgtatagaaagaaaaagagaaagttagaggaatagactatggcacgacggaaaaacatgaagagacggagagttattctaggtaatactttccatctgatcagagaaaatggaatggataatgtttctttgcaaatgattgcagaaaaatcaggcatttcaaaatccttactgcagtcatactatcctcataaggctaagttaactaacgacattatccgcaatctttttaatactttaggtcaacaagttaataattatgacatggctaatagcaatcttccttatgctagaactaaggcatttatttatacgattgctatcttggggatgcacgatgagggcttggaccgtattatttctgaagcttttgttagcaatgctaccctagataattggggaatcatgcttaatgaatggattaaggaaaatcatttatttgatgacattaacgttgacgaaagcgaacttgagacaggaattgcgtttgtaactagtggtattggccgtctatatcatgatcgcaaaaaacaccatttaacggccgaagctcttgctaactatgcaacaagtgcattgatgttcagtttcttgcattgttcttctgaagaaattgatcaagccttaaaagaaggacatgaaattattgaaactgctgatatggaagttgttcaccgagcaattgatacaatgttcgatgaaggcaaggaaattttcagctaaaggggagtcgccatggttgaaggcaaaagagctgatttgcgacgaatgggttatgagcaaaataaccaatataaacgtttgttggctttcgtcatctttttgattgctgcattatcattgattacagctacgtttttaaatccaatctttatgaaaaaacagattaggactagctataatagggcagtagttgttcgccaagtgaataaaaattatgatagcctagctgatttgattaatgcagatagtgaagataattcaaacttactatcggatacgcaaactcaaccaattgccgaccatattattgattattctttgggtattcattggtttaaggttactagtttgccactggctaatcagattttaagcgatatcgatcaaggaattgctaaaggctcgtcaagtggggcacaggaagttaaccgtaaactgaaaaagcagggaactaatgcaccttacgcgattattaaagccttcaatttaagtgtgatcactttaggagcaaatattgctggtttattgtttatcgttaatttgataataattattgttaccattattacaatggtttcgctactcaacgatatgaagtcgcgggctacaattcgaatggtgattcatgatacgatggctgctggcatgtgggcaggtttttggctaattttgatttcaggcttgttagcacttgtgccagtaatctttaatgtcgataatatcgaatttggctttttgcttgagattggcagtagcgtctttttggaatatgtaattgctggggtaattatttacatcatttgtgcgataccatggcaaattacagctgctaaataagaatgagaaaacgtaatctgtagaatgattacgttttttgtttgcacaaagaatcatctttctttataattaaaaaataattaacaaatttcatatgtttatattttaaaagaattgggcgagtttatgaaaaaagctaaaattataaagacttttcttgctttcattactatgctttcgactctttttttgtttaatcagcctgttaatgcagccaataaggaggttgagactggctcagtgatgaaaaaaattaagcagtcgaaagaattagtagtgggcacctcagcggattatccgccactggagtttactaccagtgaaaatggcaataccaaatatgtgggggttgatatcgagttggcaaaagatattgccaaggatttacatgcaaagctagttattaaaaacatgagctttgattcacttttggtagcgctagagacaggcaaggtagacatggttatttcggctatgacacctaatcccgagagaaagaagagcgttgatttttctaagatttattacaagccaagtggcgaatatttcttaattaacaaacgcgatcaggccaaatacaaaaaaattaaagattttgctggtaaaactgtcggtgcgcaaactggtagtattcagtattctttgattcaaaagcaaatgaaacagtctaaggttaaaggcttaggcaaaatcaacaacttagttctggcattaaaatctaataagatctctggcattgtcatggaagaaatgactgctaaggcctaccaacaaaacgacaatagcttgatggctgtgagaagtgacttgcgtgaacaacaagctggtaacgcagtagcaattgctaaaggacaaaatgacttagtagctgctgtgaacaagactattaatcgcgttgaacaaaaagatttgattaataagaaatacttgcctgaagcagctaagtatatgaagacagcgcagaagacgaacacgatgactaaatatattccttactttattaagggagttggctataccatcgtgatcacgattttctcagtgttaatcgggatcatcttagggatgctcttagccttaatgcgtttgtccaagaataaattgctgcactggattgcagtttgctatatcgaattcattcgtggtacgccacaaatggtgcaaattttatttgtttactttggtgttggagcattaatttctaacctgtcagctgttgtagcggggattatcgcaattgggttgaactctggtgcttacgttgcagaagacattcgttctggtattgcttcagtagctaaaggacagactgaggcggctagatcattaggtctttctcaagctaaggcttaccgctatgtaattattcctcaagctttgaaaaatatttggccggcactaggaaacgaatttattaccctgctgaaggacagttcattggtttcagttattggggtaactgaattaatgtaccaaacggaattgattcagacttcgacttaccgtggtgttttacctttattcattgccatgattatttactttatcatgacatttactttaactagattgcttaattatttcgaaagacggatgaaacacaatgactaaaatgatcgatatccaacatttgaagaaaactttcggcaaaaatgaggttctgaaagatatttctgcggaagtagataagggccaggttatctgtattatcgggccatctgggtcaggtaagagtactttcttgcgttgcctgaatgtattagagcgtcctacgactggtaaaattgtttttgatggaacagacttggctagtctaaaggatggtaaggaacttgatcaattgcgggaaaagatgggaatggtttttcagaactttaacctttttcctaatatgaatgtaattgaaaatattaagttggcaccgatgaaagtcaagggtgttagtgaagctcaagctgagaagactggactagtcttacttgaaaaggtgggcttggccgatcgtgcaaaacaatttccagctagtttatcaggtggtcaacagcagcgggtggcgatcgctagagccctagcaatggatccggaagtaatgctatttgatgagcctacaagtgctcttgatcctgaaatggttggcgaagttttgaaaacaatgcaagatttagctaattcgggaatgacaatggtgattgtaactcacgaaatgggatttgctagagaagtagccgatgaggtctggtttatggctgatggctatttacaagaaaaaggcacgccacaggaagtgtttgaacaccctactagtgaacgtgcaaaagatttcttatctaaagttttataatcaaaaaggctcaagcattgcttgggccttttaatttactcatctgtaatgatggggtttgataatacgtactgtcttacgaaaaaattttgatgccatcctttttgaattaatgcattaaaaaaggtgttttgattattaggcaaagcagtggctttgggaatgatgacagcacgtaaaatcttgttttgaagtaaaattggtgattgcacatctgtttcgctatttaaattagtggttgcttgattggtcggcgtgttggttgtatcctgctgaacttgataatttgtagtgtcattagtactatcttgcttaaatagcttgaatctgtacttctgcacgcctttaacgtcaacttcatattcatgtcctgcaactaggttagtatttgcgggtgaataagttaggatcgttctaaaattgccgtagccacaggagctgtaattcttaacatgagctgcagtagtaacaactttagtatctaaatcagtgatagtaattgttggcttatttttaatggttctatctgataaatagagcgaccacatgatatttttcccttgaagcaattcaatagggaaaagacgcatgctaggataagcaactaccggctgactagcaggacgaaaagtatcattaatgtttagtactttttgaacggaatagcggtagccatttgtaccataagctgccccaatgcctgtagtggttaaacgacttgaaagtagccaagctcggtgaccggtatctgaaccagttaaattataatggtcagtaattaagtcagtgatcacatccccagcggtttgctgtgaaacattaaagtttaaatttgaagtttcagaagtgtctttagctagcttccaaacaaatttggagatattgcttggcttagtttcactaggtaaaccatgttggttaatgaatgggttagcattaattgcggccattacagcagccgtaatctgcgcgtttttattaagtgtatcagtagtcgagatagcgggcagactgaacaatgatcgatagtaattgatataatctgtttgcgttttaatgtattttggatctaagcgacctaccttaaattttttgcttagatttggctttttagcataaatatttgcggcactataactagttttatcaaggttcgcatattccttttgaaaattatgaacttcgttaacttcttgtgttgtgaatgtcgctgcttgtgtaacttgtccggcgagggggataaataaagttgcggcagcggcaatagaaaatttccgtagaagcattttagactcccttctatggttgtcagtatacctttcattataaactataaccaatgaaaaggctttagtgaaaaatattccactattttgcgcttttctggtattctttgcgtataattaaagattggaacatttaaaagaggtataaaataatgactaaaaaattacaagttggtttgatttttggtggtaattcatcagaatatgaagtatcaattgtttcaggccgcaacatctataaagcaatcgacaaagataagtttgatgtgcacccaatttggatcactaatgaaggctactttgctaatgaagaagaaagcttcaaggttttagatgatccttcataccaagttaagaacccacataaggttaacaacatttctaacttaattgaattagaaaacttgccagaaattgatgttttcttcccaattgttcacggtaacttaggcgaagacggtgttttacaaggtttgttccgcttgatggataagccattcgtcggtgatgacgtcttaggagccgctgtaacaatggataaggaattcactaagatcttggctcaaagagttggtgttccagtcgctgattggatttcaattaagcgttttgaatacgacgacaagaagaatgctaaacttaactatgaaaaggtagcagaaaaattgggccgcgacatgttcgttaagccatctaaccaaggctcatcagttggggttagtcacgtaactaatgctgacgaatatactgcagccttaaaagaagccttcaagtatgacgataaggtcttagttgaagaaactgttcctggcaccgaggttgaaacagctgtcttaggtaacgacaagccaattgtagcaggtgttggtcaaatcaccaatgcaaaaggttcattctacacttatgaaaataagtatgatgataattcaacttctaagttacaaatcccagcagatttaccacaagaaattatcgatactgttagagaaaatgcacgtaaagtttatgcagcaactgaatgtagcggcatggctagaattgactccatgctcaccccaggtggcaaggtagtcttgactgaagttaacgctttaccaggctttactaatatcagtatgtatcctaagttgtttgaagaagcaggtgttccttacagcgaattgattacacgcttaatcgaagcaggtatggaccgttttgatcataagaaaactttgcttcacaagcatgactaaacgccaaaaatatagaggtagatttcaatgacgactaacaagcatgattttgaagaattggctgcaccaaaagcagctgcacaagaattaggaattagtgttgccacgttaagaaagtattctttaatcgtggagaaggtgaccggcaagagcgactattttgctcggactaagcaaaaggctcgtctgtatcatcaaaaagatattgatgacttaaaggcttttcaccgtttatctaaaaatagtggcttaactttgcaagaagccgctcttcaaatctatgctgttagtgaaaagaaacctgaacctgaaactaaagaaccagctcctaagcccgcttataacagtaccgatgtaatggatactgagcaggtggttaagttgcttaacactttgcaaaagacaatttctaatcaaaatgaggcaattaattctttgcagaagcaattgaatgtcattcaaaagcaaaatcaagatttaattgaagcacaaaagcaattagctgcgccacaagatgatttagataagtttgcggctttgccagatatttctggaattgtgagtgcggatgaacctaaaccgaagagtgaagaagaaaagcgcgctgaagttaaaaaagacatgaataagagtcaagaacaaatgcatgacgagattatgtctaaggcaaaggaaaatgccaagaagcgggctacttcaaatgttcaccgtacactagaagatatgcaattaacggaccaaaaggaacactggtggcaaaaaatctttaagttttaaacaaattgattaagaatcaagagctgacctaacaaaaggccagcttttgttttacagtaggcgtataacaattaataggaagtagaagtaatgaaatttaaatggaaaaagcgctatacgatagcagttatcgtggcaattgtaggagcattattgacggtcttgtcctattttgccactgatatttaccacaaggacgacgttgccgtgattaccgatagcaagatcaaggatactttgattgaaaaaagtgaagatgtgtataaaaatgcggatgaaactcgccagcaaattttgcacttaaaagttttatcgggtaagcacaagggcgaaacttacacgactaaaaacgtgtattatccttcgcaattgacgacgcaaaagtatcgtgcaggtcagagaatttttgtcaatatcaagaagggtgatccagcgatcgttaatcctaagcgtgattgggtgttagttttggtagtgacaatcactttagcattgatggtggctgcagtagggaagcactcactctcgctggttgtgtcaatggtaatttcgtggctgatcttttatttgattatcatttgggatgtgcatttgaatggcgcccacattattttgctgtttggcttagctgatatcgtcttttcattctttagcttgctcattgtgcagggcttgaataaaaaaatgttggcgacttggttggcaacgctgctaggagtatttgtttcttttgccttgtgctacgtgatcatgaagttaacgggtgaatcggaaatgaaatatgagaccggtgactatgcaacgcaagatccacgaggcttgtttttagctcagactttgattggaattttaggtgcagtaatggatgaggcgaccgatattatttctagtttgtatgaattaattcaaactaaaaagaatattacgatgagacagttgattcatagtggtcgaacgatggggcaagaaattatgggaccgttgattaatgtcttggtcttaatttttattgctggtgcgctgccagaaactattttgtacttgcgtgataataatactttagcttcaacttttggctttactctgtcgctgggggcaacgcaaagtgtgatttcggcaatcggaattgttctgacggttatttttgcgacaggatgcagtttgttcttcttgaaaaaacgcgattggaagagtttgtttaaaaaagaaggtgagaataaatgagtacattatttgcattgatcgttgtcttagcgattttaatgacaatcgtcggtggtgaaactggaattcgtagtttttttagtgtgctaattaatacgattctattgatcttagtggcgatgctaatatcatggggaattaacattgcaattttgacgctgatttttattcctttaaagctagttacgattatctttttaggcactcatgactatacggtagcaaagaattcattttattcttccttcttagtgtgtttgattattagcctctttattttgggttgtcaatacctggctcaagctgcaggactaggaccagaggcaggagagttattggttggcttgtcgcagatgccgggcttgagttatccgatgattgccgtgacagtggcgattttctcaactttgggtgcaatcgcggaagccgcggtagcaatgagttcgggcttgctagaaatcaagaagcataaccctgctatcggtgaagaagagttgatggcttctggtacggttattggtaatgatgttttgggtacagcaatgaacacgattttatttgggatgttcggtagttttttatcattattcttatggtatttccgcttgcattacacgattggtgaagttttaaatgaaaaactttttgtaaatgaagcgttaattatcatgtattctttgattggggttatattaacagtgccactatcatcatttatgctatcaagaggaatgagcaagaaaggaccaaaacatgagagtagaaaatctgacgctgactaactttaataatcgtgaatatcaagttcatacatatgcgctagagcctaatcctgaattggttgagcaaaagcgcccgctagctattgtagtaccaggtggtagctttaatcacttatccaaaagagaaggcgaacccgtagccttagcatttaacaatcaaggcttcaacagtgtggtgatggaatataacttagtgcaagatccagacaaaatttaccctgatgcggggttagatgttctaagtactgtgaaatatttcagagaccacgctgatgagtatcagttagataaagataagattttaacagttggcttttctgctggcggtcatgtggtcagtgtagctaataacatggctttaaataaaaattatcagacaaagtatgattttgataagactgatgttttacctaataagacaatcttaggctatccgctgattgatattaaaaagattggttttccgattccagaagatcaaaaagcaaaaatgcctgtagaggaagagattttggatagtgcattaggtgttacacgtgaaacgcccgatacatttattttccaggcatgggatgatccggtggttttgatcggaaattcgattgaatatattggtgctttgaataagaataaggattcagcagaagctcatttgtttaaccacggttaccacggcttttcattggctcgtcacaatgtggaaactaaggggcaagattggcaggataatccgcacgcggcgcactggttcaacttggcaatggaatggctaaagagtgagtggggcgaatgatgtgaagcataaaaaatcttctaaccctaatgacaatatctatcacactatcgtcaagaatagaaaaattgaccgaatgattatgccttttgaagcggtgtactgcgtgtggctaatcattacgctggttcttagctttaagctatttgcttattcgattgacgcacaatttgtgctaatttctctattttttcttagcgggtgggtttcgtcattggttaagaatcatcgcatgaagaaaagtagaaaataagataagtaaaaagagttctcgcacgagaactcttttttattagaatcatttactttttatctctaaagaaaataacttccttagcagctacaaatggtccagatgacttgtaaacctttaatctaatagctttggcatcgacatttcttaagccaacaaccttattcttgctatcagacttccaagtcaagtgatcgccgtatggcttaaagttaacgccatcgcttgaaagctcgacactaacttcaacaggatcgccttggtgatcaatctttctaggtacccagcccattcgactcaagtgttccaaatgattaaaggtgaagtttaattcaagtggcttgtcttcgctgaccccatcaatggtttcccattcacttgctaacttcaaatcagtcaagtaatcaattggatgatccttaggactagctagactgctcgtgacatgaatgtcattaattgcatagttcattggatcgggcttggtaattgcgccaaacggatctgaccattctgaaactttgttgccagctacataacgcaaacgcagggtgtagcgggtatttggcactagttcatggaaagtaaatgaattaccatcaatgccatcatgtaaaatgccgttaacttcgatttgaacttggtcggttaattgcggccaaactactgttaatgaatgagagctaatcttgtctggatcaaccattggttgttttggtgaacgcaacagtgaatccgtaatagcgtgaaccaaagtttcattgccatatctgaagtttctgatcgtaatctcaattttagaatcggtaatatcgcgtttagctaacttaatttgtaaagcagtttgtttcttttcttggtattgatcaaattcaggcatccagctgtaatttgtgttaaagaagaagccttccttagcatgggcgaaggtatcaacggtaccgtactcctgcatcgggatttccttgtcgttgattttaacagtcaaaccatcaggataaccgtcacacatgatgttcaagttggtggtgttttccgtttggaaagtattgaaatcgccttgagttgggtcgatggtgatcgtcaatttgcttgcttctaaatcactcgtgatttgtgtagctacatggtttcttgaatagtcgttatagccgttatcatcgtaagtaaccattttactcttgccttgagggtagaggacatagttgcgttcgccgaggtcaaaaatagcgccgcctcgtacaaatactggtaaatgccaggatgggtaagactgcttattataaacgcgtccgcccaagtactttttgccatcaaataagtcaacccacattgttctgtggttaggcaagtaaaggttgtcttttcttgaattgccattaccatcttcgcgaccgttaacaattggcgaaatcaacaagttaggccctaacataaattcatggcccacctgtggggtgtagttgacttgttcatgtggaaattccaagaataatggccgcaagattggctcaccgacttgagcgcggtagattagggtatataagtaagtctgcaattgctcacgtagttttaaataggctcgattaatttgcgtcatcttactattgtaagcaaatggggtcttactaaatttaccttgatcgtctaagttgaacaggattggggtaaatgccttccattcaaaatcacgaatggcaatttgagcattaccaccgccagcggtaccgtcaacggcactaccaactaaaggctggcccgaaaggctagcccccaaaaagccagcaacttgtgttggaatgttttcccagttgccgccaatgtcaccaaaggctagcattgttctattttgactaccagcaataccagtattagagaaaatcaacggccgcttacgcttcaaattgttgcgtaaaattagcgcatcatttttcaatacttttggatcggttgtgtccgtttgaataaaggtggtatcaggtgaagccttcggtgtgttgttttgactccaaagaccagcgctaacgtcatgtatagcggcgtattcactgaagctagccatggcttcttcgttgatttcttgcacatcatagttaggcacgatccaacttaatttaaaatgctgcttctggtagcgatcaaccattgcccgtgctgagaattgatattcttcttcgccattcaaagagcccttgccactagcatcttctggcttgttagttctggtgtaataattaccgtcttcaaacataacagcattacgttccttagctttaccaggctgccataaggtagttaaaaagttgccaacatgacctaatcctagtgcatatttaggtggcatcagcggcttacccgttaacatgtaatactttgccaaaatatttttgggtgaattacctaatagataaaaggtatcaaacatgttggtgtcgtgctttaagatagtggcatccggattgcttttaccaaagtcataattgccagcactctcagtattgcgcaattcaccaaagccggagttagcccagaagaatggcacttgggtcaaaacgccgcctttaccggtaatcttgtcgcgcttgattgaaatgatttcacctttatgactgaagtagccgttctgcatcccgccaccaaagtaaaattcattcttgtgttgcttcaaaatttcggtagtttgatcattgcctaattcaagtggactcagctgaaccaaacgattgcggtgcagcgtctcgtcaaagatgctcattacggctggcttttgttggaaaataagttgataattgccagacttaatgattaaggaatcgctggttgccttaggctgtgatttttcaaaatagtcattgttgaattgagacaggtcaacaaaagatgagtgattctcgtcaaacttcttagctggatcgagaaaatatctgaagatcccgtcagctaaaatataaagacgagcaatatcgccggtggagtagtgaagttcataataatgatcacgtttgttggcaccgataagttggcctagttgatgtctttctatttggttttgtgtcatatttattcttcctatttaaacttgctaccttatattataactaaaaatcaaaaaacttcttaagcaattgtactaaaactggtatttaccaattttgttagatataattaaattaacaattacgatttagacatgtaaagaaagaagatatttatgacttattacattcatgcagataaatttttcttagaaaacagaacagaaaacggcggctatcttgaagttcaagataatggcaagtttggctttttctatccagaaagcaaaaagccagaaggtaagattgtcgattatgctggcaaatgggttgcaccaggattagttgacacccacatccacggctcattgcgtgaggatgtaatgaagagtgactgggaaggcatcaataagatctctaagggcttgcttagtgctggggttacttcatggatgccaacaacgatcactgccgcaagcgataccttaactagaatctgtaagatgtttgcggaccatcaaggtcaagaagaaggtgcaaagattcaagggattcactttgaaggaccattcttcacggaagaacatgctggagctgaaaatcctaagtacatgacggatcccgatattaatgaatttaacaagtggctggacgcttctaatgggatgctgaagaagatttcaatggctcctgaaagaaaaggttccaaagaatttattcgtgaagctgttaaagaaggcatagtagttgttttgggtcactcaagcgctagttttgaagaagcggtcgcaggcgttgaagcaggtgcaaccatgtttactcatacctttaacgggatgcctgatccaagccaccacacgccatcaatttctaatgcggcaatgacgcttaataatgtgaccgatgaattaatctgtgatggccaccatgtgcaaccatgtatggctaagactttgattaatgccgttggtccagaacacattgccttgatcactgattgtatggaagctggcatgatgccagatggcgactacatgttgggtgaattgccagtctatgtaaaagatggcatggctcgtcttaaggacggcgacaatttggctggatctatcttgcaattgaagcaagcagttaagaacgtggttgactggaacatcgttgctccagaaaaggcagtgatgatggccagctatgttcctgctaagagtgcccatatcttggacaattgcggtacaatcgcaccagataaggatgccgacttcttgattttgaacccagatttaaccttaagtgaaacttacttgaatggtgaatcacgttataaggcttaatttgttagtctagttttaaatagtcctcattagattgagggctattttttgaccctaaattttggcaaatagtatacaattaataatagtaaagtaggtattatacattaggagaaatttattatgccagatggaatcagtcaattagagactgtaaaatagtttgtgtaaggatgaatgattccttaaatttatttctttaaacattagaaaaaggagttcctttctcgtacaatgtcattaagttaaggcattgacttttttacctaaaattaacttgattagtgggcgtttatttactttgaaagtctatcctaaaacttgataggagggattaatttgagcgaagagaatcaaaagaagctgtttggcatctcagcgattatttgcattattttattaacgattacctattttggtgatttagccatcagcaataccttaattaattatcacagctgggtagggacgttttgtcagacttttggcgagtttccggtttatcttatttttgccttatgtggacagattacgatgacttatgcctggaaaggcgactgtgaaaagctgctgggggcaggaccgttgtttgttggcgggcttgcactgtcgctttggcagagcaagaagtatgtcaatgaattcttgggctatctgtattcggtacaaactaaccttaaaaacggtaaggcgatagcaatggccaacagcgactcagtaaagggcggttatgcaggctcaatgattataatggtctggctgttgtttttcgttatatttacgctgttggtacaatggtggctgaaaaacaaaacgactaaacagctgactcgctatatgaaaattgcgattttggcgtcattgacggtttggtttgcattggaagttaatctgaccttaaaagacctgtggggacgctatcgcccatatgaactcacgatcggtaatcatgaatttaccaattggctgacgatcaatggcgttaatgggcataagtcattcccatccgggcatgcgatggcggcaacgttatgcatcgttttttcatggttcgtttccaacaataagcgtaagatctttttcattggtggcatcgtttatggtgtcgtgatcgctataagtcgagtaatcgtgggcgcacatttcctttcggacgttacgttctcgtttttcctgaccgtactgatcatctttatcatgaatggtcttggtaaaaagctaattgaagatttttaaaaattagggctgtgaccatcgaaaggtgaccacagcttttatttatgtgttaaaagtcatgagaatacgccacctttgataaaatttctaatcaaagatagcgtaaagcggtttcaaaaattaagcaaaaaacactcatcaaattctgatgagtgttctaagacgttctccgttcagagtcaatgtcttaacttaatgacattgctttctcgtatgattggtttgaacaaaaaaacacatacagaaagaagaactccttcatgaatgattttaccaaagattttgctcaagctctattcaatccagacaaaataaatgatttattgcgcaaagagctacaacaggctgttaataacttgttagaagctgaattgaccgcctttctgggctatgatccctatgccagaaatggctggaatactggcaactctagaaatggtgcttatttccgcaaagttgatacgcaatttggcccaattgaagtgcaagtgcctcgggatcgcaacggtcaatttcatcagcacacgctgcctgactacaagcagcactcggatatcttggaaagcatgattatcaagctttactccaatggcgtgaccaccagggaaatagccgatctaattgaaaagatgtatggcagccattacagtccagctcaggtatcaaatatttccaagcagatgattccaaaggttgaggcttaccacaaacgcaagctaagcgacaagtttttctgcgtctatttggatgcgacataccttcctttgcgccgagaaacgtttgagcgttgagcgtgaagcagtctatattgccattggcattaaacctaatggacataaggaagtcattgactactgcattgcacctagcgagaacattgaagtctggacagagatgcttcaaaacatgaagtccagaggcttgaagcaagttgaactctttctttctgatggtgttgttggcatgaaaacagccttggccaggacttatcctaaagctcattttcaacgctgtttggttcatgtcatgcgcaatatctgcgctaaagtacgcgtcgacgatcgtgaaaagatcatgaacgaattcaaacaggtgcatcaacagacaaacaaagaagaagccacagctgtcctgcatgacttctataccaaatggggcaaggtttacagccatgttatcagaagcttgaaagacatagaaccagatctgctggtcttttataactatcccaagcagatcagagcttcaatttattcgactaacatgattgaatcatttaacaatgtgatcaagcgcaaagctaagcctaaggcagagtttccaactgaacagtcgcttgatgcttttattggtattcaggcaatgagctacaatgaccgttatttcaatcgaattcataaaggctttggtcaggttcaggacaccttagaatcctactttgattaaataaataattaaaaaatcaatttacgagaaagaactatttacacaaaagatttgacagtttcgtcaattactagtactttttatgtaataactttcaattaattgaataatttgtactcttattgattaaagaaaagtatcacatatgtttcatgaatctcgtctagccaagtaggtgagattttttattatgtttctatgtaatcgctttcaatttagaaaaaatatgctatattatgagtgtaaagaaattaagaaataaaaatattaaataagtttaagtaaaaggagacaggtgagttccgatgggcacttgagagtagaaagtcagatatatagaaaggtttgtgataccaatgggcatcgtaaattgaaaacaaaatgtagttcaataatcatcaagtgatattaatgtacataagaggccgtgaaattattagtaggcatagaataataactagttgatgaatcacttggattaggattaagaaagactttcatacatgataaatattaataagaaatgacctttcgctgaaatgaagtatgcgaagggtcatttaattttggcttaaattttttatccgatgtaatcacatctgtttactacattacgatgtactatattgcaatgtagtaaattacgatttagtaagttataatttagtaaagtataatttagaagatggtgaccaaatgtttattggacgaaagaaagaacttacaaaattagagaaaatgtatcaagctgataaatttcaatttgcagcgatctatggtcgtagacaaattggaaaaacagcattaattaacgaatttgttagaaataagccaactatttactttaccgggctagaagaaaatgaattctataatcttgaacgcttttcttctgcaatcgaacattttaaagatccagatagtctgagcagtgtaaactatggtaattttgaaaattgttttcgagaaattgctcgattggctcaaaaagaaagaatagtattagttattgatgaatatccatacttagctaatgcagtccatgcaattagttcaatgctacagtcttatattgatcatgaatttaaacaaacaaatttatttctgattctatgtggttcttcaatgtcatttatggaagagcaggttttgtcttataagagtcctttgtatggcagaagaactgctcagtttaaattacagccatttacgttacatgagacacaagaatatttcccacacatggataaagaagaggcctttattctaaatacgattactggtggcgttccattatatttgtcatatatgtcagaagacaaagatgtttgggaaaatattgaagaaaactttatggacgtaaacgcgccactttttcaagaacctaataatttattgaagcaagaattgcgtgatccagccaattataattcaattattaatgcaattgcaggcggggcatctaggattaatgatattgcaactaaggctcatttatcgacgccgttggttactagcaacgttactaatttaattgagttaggcattattgagcgcaaagtgccggtaactgatcaggctaagcctaaatcacgtaaaacaatctatcaaattgcagatggcttgtttagattctggtatacatatttgggtaaatatatgagttccattgatcgaggacaaacttcattggtaatgaaagtaatcaaacaagatttacacaatttcatgggaccggaattcgaaaaattggctcaaaattacatgtgggatcatgatgaggatgatgaagttatccctatgccgtttatttatctaggtaattggtggggcaatgatccgcaagagaaaaagcaagtcgaattagatgtagtggggctgactgcagataatctagttggatatttcggtgaatgtaagtggaaaaacgagcctatacctagaagtgtcttggaaaaattaattaatttgagtaatttgattagcgtggctaaaaggcattactatttgttttcaaagtcaggctttacggattcatgtacggagctggcagaacaagtggggtgcaagttgattagttttgatgaaatgtaatatcatttttcctattatttttatctgttgtgatcggagtaagtactggtgtttaaaaaaggcgataatgtggtgttaattctaaagcctaatggcaatcttgaaatgaaaaaagaaaaaactaattttggggacgaagtatcaaaaatgtctgctaaagaaaaaagattgcagattgaagatttgggatatgatccattagaacaaagatcaaaaggtagagaaagaattgaggattaaaagttagaaaaggttcttggaatcttttttgatgaatttaggtaatctaaacaaagaaacggcaccgctagataattagcgatgccgttttagttaggtttagcaataatcaactaagacataataaacatactaacctagcttaggtagctatattattatgcctgcttaatttttttaataaactgcgccgtcgtagaagttgtaacgagggcggttgaagtcgaagtcttttaattcactgatcttaattgcgttatcgcaaacaccccagctcattaagttgattggcttaccataatcttcatcaggaattaccaacaagatgtacttgccttttgaaagggcatagccaagttccattcccagaccaacatcttcttcttcaggcaagtaaacgccaagcatgatgtcgctggacttaatccctactaagtcgttatggtaggtagctgatgcccattcaatgtcgtgcaagtattcaggatgttcatcaacgcggatacccttatattgattatcaagtggtacatagctgttttctaagtcaacggtaggattttgctttagagcttccattgcttctttgtaagccttattttgcttttcgttgaaccaaccggcaccaaagtataaagtttttgtctttgccatattttttctccctttaaaaatgatttaccttaactttaccatcttttgggttgaaaaaaacgtcttgttaacttatggtgaaaatgttaattccacattaggaaggaaaaatccaatgactaatcaaaatctttttgcaccggatgcagtatttatttctaatcaaactaagcaagatttggtttttaaagaagtttacgagcatttacgcgaaagtggctatgttaagggaaactttttacaccatattgtcgaaagagagcataattttccaacgggattggatactgcaacactaggtaaaaatattcctaatattgcgattccgcacaccgagggcgagtttgttaacacgagactgattgttccggttgcgctgaaaacgccagtcacttttcataatatgattaatcctagccaagcaattgaagttaaatttttattcatgcttttagataatgacccagatgggcaagctgcattattagctcaagtgatggattttttggctaatacgccagccaacgaattgcgcgaagtttttaattttactgatcctagcgcgatttatgcctttttagagcaaaaatttagcaagaaaaaagaagactagtttttagccttttttgaaactaagtacgttataatatttttaggacaaagaagaacatagacgtgcatgtagcaggatagctacctgctcaagataggcgcgcgtgtgggctctggcaacagagctcttttttatgcctttttagagcaaaaattcggtaagaaaaaagaagactagtttttagccttctttttctaatcttcaagataaatattacgcaacttcatgatgtctgcacttgagagcttcattacatcgcgtaggtagttattaataccgccatattcatcgtttagtactttaacagcatggtcaaggtattcactgcggacactctgaatgtcacgaatcgattgcagcacattttcatttttaccattttgacgggcatgttcaatcatactgtcgacgaaatccttggtagtgatgttggttaaaagatagtctttcttaatcgtatttagtggtacgccaagagcagataatgcaagtaatgcaccgaagccggttctatccttgcctgcagtacagtggaaaataacactttcgccatccaccgtattttcaagcaagacatcgaaaaacttgcgatatgccttttgtgcaggttcactttcgatcatgtcttcgtaagcataatgcatgtgattgaagccaaaatcagcgtcgtcgtgtgcttgtgtatctaagtcagtgatactcttggatgaattggttaagtcctcactgaagacgggatcatagatatattcaacaccatctggcacgcgatcgggttgattatcaacttcttctttacttctgaagtccacgtcatatttaacgccgtaatcagttaaaaactgcttatcaaatggtgaaagatcagctaagttaccggttctgagcaacttgtgcatcttgatttttttaccggataaagtttcataacctccaagttcacggaagttgcgtccactagttacgccgattaattgattagttaattttttagtcaaaaaaattctcccctttctgttaatgaatgtcatgaatattattttagcaacaaatcttcaagcaaacaatcaattaaaaagtaacggctttcaaaattatgctaaaataaagagtaagtactagtgcaatttataggagatgaattaacgtgacagataaaagaaaagaaagcattttagttccagttgatggctcagaatcagctgaaagagcctttgacaaggctgtaaaagttggtttgcgtgatggtgctcatgttgatgtattgaacgtaatcgatacgcgtcaatttatgggtgaaatgcaagacactttgatttcaggagataccatttaccaaatgactcaagattctgaagaatacttgaagagtttgaagaaatgggctcacgataacttcggttttgacgatgttgattatcacattcgttatggcagtcctaagcggattatttcttacgacttcattaaggaccaccataacaatttgatcgtaatgggtgcaactggtttgaatgccgttgaaagaatgcttatgggttcagttactgaatatgttaaccaacatgcgttggctgatgttttgattgttaagacagatatggctaacaacccagtaaaaccaacgatgaagaagaactaattcctataagaatggacgttagatgtgaatatactcatttaacgtttttttttataaaaattagtcaaaaagcttgatagaatacgaatgcttttggtatcattttataaaatgaacgtggaatgactgaaggagagtgggataaattgcttgcacaagctaaaagaattgaaaacgtttttcttactgtggcaaagtcttcctcccgtgaagatgttttttctgttcgtttatttgataataacgttcttaaaaaggcttaattattggtcgtctttgagcgactcgtaattaagccttttttagcgtcaagtttgtttttgtttattttgtgttttatggaggaatcaatgaaaagatttcgtaaaatcttggtagccgttgtggcaatacttgttgcagttgttgcaactgcatgttcaagtaagagcagtagttcaaaggaaaactacactcctaagtcattaactattcaatttgtaccaagtcaagctgcaactaagttgcaagctcgtgctaagcctcttgaaaagatgctttcaaagagattaggtattcctgttcacgtttcaatgtcaactgactacaacactgttgtagaagctatgaagtcaaagaaggttgatgttggttttcttccaccagatggttatgtattggctcacaagcaaggcgctgctgatttgcttttgcaagctgaacgttggggcgttaaacaaccaggcggtaaggcaactaaggatttagttaagaactatcgtgccgaaatccttgttaagaagggttcaaagattaagtcatggaaggacttgaagggtaagtcaatctcagttcaaaacccaacttcatctgcaggttacgttttcccagttgctgaacttaaggaaaagggcttggatgtaaccaaggactctaagttagttactgtaactggtcatgaccaagctgttttgaacgtattgaacggtgacaccgatgcagcatttgtctttgaagatgcacgtaacactgttttgaaggacaacccaaagattatgagtcaagttgttccaatttacttcactaagccaattccaaacgatactatttcagtaattccaagcatgtctaagtcattccgcaagaagcttgctaaggcatttatcgctgttggtaagtctaaggaaggccgtaaggttattgaaagtgtctacagccacgaaggctatgattacgctaaggacagtgacttcaacattgttcgtaagtatgacaagatggttgaatccactaagaaataataattcaaattaagggagctgcgattaaatggcagataagccaatgatccaattaaaagatgtttctaagatctatgacaatgggactgtcggtttaaaggacatcaatttaacaattaataagggcgaattcgttgtagtagttggtctatcaggtgcaggtaaatcaactctgcttcgctccatcaatcgtttacacaatatcagttcgggcgatattgtgattgacggcaagtcaattactcaggcaaaaggtaagaacttgcgtaacttgcgccgtgatatcggaatgattttccagagctttaacttagttaagcgttccagcgttttacgtaatgtattagttggccgcgttgcttattacccaacttggaagaccacgtttaatttatttagcaaagaagataaacaaaaggcctatgaggcattgcaaaaagttgacttggctgacaaggtttatgctcgtgccgatgagttatctggtggtcaacaacaacgtgttgcgattgctcgtgttttgatgcaaaatcctaaaattattttggccgatgaaccaactgcatcacttgatccacaaacatcagtcagagtcatgaatgacttaaagatgttgaacgaaaaatacggcatgactgttgttgccaacttgcacagtatcgaattggctcaacaatttggtgaacgtgtaattggtattcgcgctggtcaagttgtttatgatggtaagatgaaggatactcctaagtctgtcttcactgatatttataatggtggcgacggcagcgaggaggcagaataatgcctaaaacaaaagatgcaatgaatttggtttggaccatcatcatggtcgctggcttgttcatttcaattgatgtaaccaatacgcacatttctgttttattccaaaactgggatcaatttgcggatatttttgtgcaaatgtctcacccagattggggctatatgagtgttatttggcctaagttgattgaaacgattaaaatggctgttttgggaaccgtcattgggtcagtaatcgcatttatttattcattattaattgcacgtaatattgttaaaaacaaggcagtgactggtgtgcttcgttttatcatgaacatcatcagaactattcctgacttgcttttgggtgcgattttcgtagctattgttggtatcggtcctgttgccggtgtcatggctttggcagttttcacctttggtgtggttgttaagctattctacgaagcaattgaaactattgatccaggtccaattgaagctttaactgcagtaggtgctaataaattacaaattattcaccaagcagttttgccacaaatcatgacttacttcatttcatatgttttatatgcattcgaaatcaatgtcagagcatcaacagtccttggttatatcggtgccggtggtattggtttgaacttgcaacagactttgcaggtcttcaactatgctcaaactggtacgatcatcatcgttattatcgtagttgttgtcttaatcgactatgtttcatctaagtcacgggaggcgttaatgagataatggatactactatgaaaaaattacctgctaaacccgttgaccgtaagaagcaagtagtgcattggctgattgcgattgtgacaatcatcattattgtttggtcattcactggcattaactttggtgggatcaaggcaactgctggccagattgcaggagcgattttctcagggattttccatccggattggaaatacgtttacaatggctctggtgaagatctgatctcgcaattatggcaaactatttgtatcgcattcttaggtacatttatttctgcaattatttcattgccatttgccttttgggcagcacacactaagcataagcactggtacacttcaagaattggtaaaattgttttggcaattatccgttctttcccagaaattgttttagccttgatgttcattaaagctgtgggtccaggctctgcagccggtgttttggcattgggtttccactcggtggggatgcttgccaagctgttttcagaggcaattgaaaacttggatgacggaccaaatgaagctgttgttgcagccggtggttctaagtttcatgtggtcatgttctcaactttgcctaacttgatgccagcacttatttcaaatacgctttatcgttttgatgtttccattcgttccgcatctatccttggtttggtaggtgccggtggtatcggttatccattgattattgctttgcaatatcgtcaatgggaccgtgttggtatcattttgctagggatcatcattatggtggtgatcatcgactggatttctggttggatcagaaagaagttagtctaattcccaaaatttgaatattaaagaaagcgaagacgaaaagtccccgcttttttgttagccgtgaaatttaaattggcattgattaagatgatcattaattaatccgattccctgcaagtaggaataaatgactacaggtcccacaaaggaaaaaccatcttttttcatttgtttggatatcttctgcgataggtcattagaagcgggaacgtcatcaaagctggcaatatcatgcacaattggagtaggtacaaaattttgtaaatatttggcgactgaacaatatttttgttcaattgccaaaaatgcccgagcatttttaacagcagcattaattttcattcgattacggataatgcccttgttttgcattaatgactcgatatctttatcggtcatctttgcgacttcagagatctgccaatttttgaatgcagctttaaaattgtcgcgtttatgcaaaactgtggaccagcttaaacctgattggaaaagttcgagcacaagcatttcatacaaatgtgactcatctagattaagtttgcaccattcatgatcgtgatactcctgtactgcttcgtcttttgtatcgccccatggacagcgaataatttcttgattcatatttttctctctttctatgtaagtaatgttttacccctctattatttattacgcaaaaaaatgcgattattttttgagaaattatatttttatgtgcgaaataagggttttaacagctttttttgctataattaggtgtgaatttcgaggaggatcctatggaaaaattagataccatgatgttggctgatgatttagccttatcacaagataaaattttaaatggcgaacaagactttggcgctgaagctgtttacaaagtaatcgataacttgggcgttttaaataacccaatcaaggattacttcgacatgactgaagaacaatattatgaagctgaaagcgatcacaaactaactttgatcaagatggacagtaagttgactgatttgcatgatcgcattttaactaaccatgttgatggttttgttgataaggacgagatcaacttaacctacaatcatgagaatccatatgaagatgatttatacgatccaactactgattatcgtgaaattgtttacagcttgaaagttattggtgcggttcaagcaattgcagctaaggacttgcaagaagtattgtctaaagatgctgtattatcaattggacttgccgcatatgctttagcacacaacgcataaattatttgagtcggctggtaagcggccggctttttttgcttttttgaggcgaaaagatgaatttgtttaaacacacaaagggaatagttgatcgaatcgttggcgccaaaaaacgctctgcaatggataaagatagtgaattgcttgatccgatgcaaaaatatactactgttggagaatatcatgttggtgccgttgatggtactccacatggtaaggactatgttttaaccgtttatcaagacgaagacggcgtgttgcgacaagcacttagtccagagactacaacgaaattagcaccggaatatttacgcaagtataatgcgaaactaggtcattttcgtgcctttcataataagaagacagggcgccgttattgggtggaaaattacttggataatttcactacggaagtgaaaaagcatattcgcccaggcactaattcggtcaatatcggtgtaattacagatactcactttaaagataaagatagcagcgatttttatggctttaatgggctgcaacatgtgcaagaattttcttatttagatcaatctggcttgctagatttaaaagtccacttaggtgactggatcgatggctccgatgctggcctggtcagtgaaagtgaattggtcaagctgaacaagtcttttaagtcggatcaggtgccatatttgagtatcaagggtaatcatgatgaaaatgataagtttgatgaacatcatgatttaaaagcctcatttccagaaaatgaattcgaaaatattatgtggcccgatatgtaccgacaacgaggaattcattatgtttcgcgccagcacggggtggcatactttgatttagatgacgtgcgggtgatttcagttaatacgtcagatgttccatatgaattaaataaccgcgggcaaaagcgctatgacaataagattgtattggctgtgcgtgaagatcaaattgaggaaattatcgaaattttggctaattcttccaacaaaaagatcatcttcatgtcccatgccaacccgattaatcgaaaggggtctaatgcacttaagtataatggccgctctttgcacgaactgctagttgcttttaatcaacgtgaaaaaggtcgaatgcacgctagcaatggtgttccagcagaatttcgtttatcaaatagttttgattttaccaatatcaagaatgcgagaattattgcctacttctgtggacatcggcatcgtgaataccagtatcggatcaacgggattcaatatattttgtttaactgttctgccttgatggggccaaatcattccctaacaactaaatacaacaaaaacttagaccgaagaattgatcaaaataatgaatttgcgggttatattgtgaacgtcgatttaaaacgacaccgcattcaatcctttggctatggtgcagcttctagacgccgggtgtatttcatttagttaaggaatagtaaaggtatttggctattacaagtgtttagcttataataaaaaagttaaagtaaaaaaattataagtgtaagtatttttatatatagataaagtagagagaaattagcttaggggaagttgaaatatgtgcggaattgtcgcattttatgatccaaaaataaacgaaaaacaagccgttattggtaagatgatggctactatcaagcaccgtggacctaattccgacggttattacactaatgatgaggttgcccttggtttcagaagattgtcaattatcgatcttcgtgggggagctcaacctatttataatgaagataaaactagagcaattatctttaatggtgaaatttacaactttaaaccattaagagaacaattaattaaagcaggccacactttcactaccaaggccgatactgaagtattgcttcacggttatgaagagtggggcatggatggccttcttaagaaggtacgtggtatgtttgccttccttatttgggatgacaacaacaagaccctttatggtgcacgtgacttctttggtattaagccaatgtactacagcaaccaagatggccacttacttgtaggttcagaacttaagagtttcttggaatatccaaagttcaagcgtgaattgaacgttgaagctgttaagccatacctcatgaaccaatacaacgaccttgaagaaaccttctttaaaggcgtttacagattcccagcaggtcactggttcgaatacaaagatggtgaaatgaagacccaccaatactgggatgcggaatacaaggaaaatagtttaagctttgaagaaactttgaagcgtatcaacgatgacttgaaggaaaccgttgatttgtacagaattgctgacgttaaggttggtgcattcttgtcagaaggtattgactcttcatacttgactactttgcttaacccagacgatgttttctcagtaagttttgatgactcaacttacgatgaagcttcaaaggctaaggcattagctgacatcaaccactggaagttctacagtgacaaggttgatgccgacgaagctatgcgtgattttccagaaatgcaataccacatggatgaaccagatgccaacccatcaatcatcccactttggtacttgtgtaagttagctcgtaagcacgttactgttgcactttctggtgaaggtgccgacgaattatttgctggctacgttaactacgggatgcatacgcataacgacattattaaggtctttacttcagaattgaaaaagttgcctgagaagaagcgggttaaattggcacacaagattaagagaatgcctaatttcccaggtaaagttcacatgtacaccaatttagctgaaccgagtgaattttatgtcggtcaatcggttatctatgacatggattacccaactatctttacttctaaagatgctaatagcattttacagccaacgtatcgcaataaattgactgttaacggcatttaccaaaaagactttaagaaagtaaagggagtcgataatgttaagcagatgcaatacattgacttgcaccactttatgcttaacgatattgaacaaaaagctgataagatttcgatggcccattcacttgaagttcgtgttccttacctcgacaagaagattgcggaattggctaactctatcccaaccaagtacttggttaaccgtcatgataccaagtatgctttgcgtaaggcttcagaaaaagttttaccagatgagtgggctaagagacctaagcttggcttcccaactccaattaagcaatggttgaaggaaccacgtttttacaaacaagttcatgctctttttgaagaagaatttgtcaacgatatttttgaccaaaagaagattatcaagttacttgacgacaactatgaaggtgatggctcacatagacgtcaaatctgggctatctacaccttccttgtttggtacaagttgttctttgttgattacgaaaacacagttaagaaatatcaacacgtgcaacctgaagttgctaagctaatttcacagggcaaattactataattctagggagattttttgaggatgagtaaaaaatttacgccgatcttactcggtagtgatatcaacgtgtatggtatggcacgttcatttaatgaagcatatggcattaaagtgaaggccttagctgacgttcaacttgctgctactcgttattcaagcattgtggacgttgaattgcatcatggctttagtagtgatcctacttttatggacgtgatgcacaaaaagatggaagaatacaagaatcacgaggagccagttatcttgattgcttgtggtgatggctatgctgagttgctttctaagcaccaagatgaattgaaaaaggtctttatcgttccttacataaaatatgacttacttgaaaagttaatctctaaggaaggcttttatgaaattgcggaagaatatggcttgccttatcctaagactaagatcattacgatggatgactacaagtcaggtaagtacgaggatgtcccatttgatttcccagtggaattaaagccggaagatccagtttcatggttgaagtgtcaatttgaaggtcggaagaagacttttgccattcaagataaggctgaatttaaggatatcgtaactaagatttatactcatggctacaacgctgaccttattttgcaagactttattcctggtgatgattctaacatgcggaccttgaatgcttatgttgataagaaccaccaagtaaaaatgatgtgtttagggcacccattattggaagacccaactccacaatcaattggtaattacatggcgattttgcccgagtacaatgaaaaattgtacgaagaagtacaacaattccttgaaaagttgaactacactggtatggccaactttgatatcaaatatgatccacgtgatggtgaattcaagttcttcgaaatcaacttacgtcagggacgttctagcttctacgtaactttgaacggttacaacttggctaaatggtacattgatgattatgttgaagatgccttgaaagataaggaaacagtttatggtaataagcttgaatctaaatacaagctttggttaggcgtgcctaagaagatcttcaataattatgcttatgacaacgactataagacgactgctgacgaacttattcgtgagggccgctatggtactactgtcttttatgacaaggatagaaacttcaagcgctggttattgatgaagtacatgttccataactacttcaaacgttacaagacttactatgaagttaataagggtaagatctttgacgaagaaaataaaaaattaaacaaatagtttaaattgagaggtaaaaaatgcctctctttttttctaaaaaattttagctgaatcatttcccaatttaatggtcttttggttaatacaagatatattcatctatatttgaacacaatacaagatgttgtgttttatgctatgataaagacacgatatttggagtgattgaaatgctaaaagaagaatttaaccaacaaaatgtaacaaaatttaatacgcctaaaacttttgttaaacgtgatgggtcaaagtatccgttcgcaatttttaaactcaacatggttttgcataacctagatttagataatgtagcacctgctgtaattgaaaaaattgtggctaaactagatgctgctgatgaagtaaatgcacaagatgtagcagttgcttttagagatagcctaaatgagttgggttatttggatgaagctaaagcttatgtgcaataccgcaagcacgatgaagaggaatggattaaacaaaccgatactcgtgcacggttaaagcgaatggttaatggtgacccaacgattgttaacgagaatgccaacaaagatagtgaggtcttcagtactcaacgtgatttaactgccgggaccgttggtaaaacagttggtttgaccatgatgcctgagcacattgctaaagcccacttgcgcggtgatattcactggcatgacttggattacacaccactttcaccaatgactaactgctgtttgattgactttaaggatatgctaactaatggcttcaagattggaaatgcctatatgactagtcctaactcaatcaatgtggctacacatcaagttacgcaaattattactaatgtagcttctagtcaatatggtggctgttcttttgatcgagctgatgaagtgttagctccttttgcagagaaaaactaccaaaagcatttaaaggatgctggcaagttcattgatgatcctgaaaagctggaagaatatgctaagagtcaaactaagaaggacatttacgatgccatgcaaggcttggaatatgagattaataccatgttctctagccaagggcaaacgccatttactactttaggttttggtttaggtacttcttggattgaaaaagaaattcaaaaagatatcttgcgtatcagaattaaaggattgggtagagaacgcagaaccgcaattttccctaaattagttttcaccattaagaagggcttgaacttacatccaggggaccctaactacgatgttaaacaactggctattcaatgttcaactaagcggatgtatccagacgttttaatgtatgatacgatcaagaaaattacaggttctttcaaggctccaatgggctgtcgttcattcttacaaggctggaaggatgaaaatggtaaggaagttaactcgggcagaatgaacttgggtgttgtaactgttaacttgccaagaattgccatggagagtcatggcgataagaagttattctgggaaatcttcaatactagaatgcggacttgccaccaagctttagcctttaagggtagacgtgcaattcaagctaagcccgaaaatgcgccaattatgtatcaatatggcgtctttggtaaacgacttaagccaggtgatgatgttaacgagcttttcaaaaatggtcgagctacgatttcgttaggctacatcggtttgtacgaagtagggacagtcttttatggtcctgattgggaacacaatgaagaagcacatgattttacaattgagatcgtgaagaaaatgcatgacttgtgtgctaagtgggaaaaagaggacccatatcattggcattacagtttgtactcaactcctagtgaaagtctaactgatcgcttctgccggctcgatacggcaaagtttggcaaggtgaaggacatcactgataaggaatactacactaattcgttccactatgatgttcgtaagcacccaaccccatttgaaaagttgacttttgaagcaccatatccatattatgctgcaggtggttttatccattattgtgagtaccctaacttgaagcaaaatccagcagcccttgaggcagtttgggattgggcttatgacaaggtaggctatctaggaactaatacgccaattgataaatgttataagtgcggttttgctggtgaattcaagtctactgccaagggttttgaatgtcctaagtgtggtaatcatgatcctgctacttgtgattgtgtcaagcgaacttgtggctacttgggcaacccattgaagcggccaatggttcacggtcgtcatgaagaaatcgtgcaccgggttaagcatatggactttggcatggaagatagtttagctaccgaagaagaagtaaaaaacggtgagtactaatgcctgaaaaagataaaaacactcaagaaggaccagatatccggagtaatttgatcaaggttaatatgggtggggataccatgtttgtggatcctgaccaatataagccacagttagatcaccaacgtgagttaaaaagaatgcaccgcaagccgaaaaatccaaaaccacaagagtggaagactgaggattattctaaacataaaattgcggattataagccatttaactttgttgatggtgaaggcgttagatgtagtctttatgtttcaggctgtttgttcgattgccctggttgctataatttagcagcccaaaactttaattatggttttccatatacgcaagaattggaagaccgcattattaaagacttgggccagccatacgtgcagggattaaccttactaggtggagagccattcttgaatacttgggtttgtttaagaattattaaccgaattcgaaaagaatttggccacagtaaggacatctggtcctggtctggatatacttgggatgaattgcaaaaagaaacacctgataaaaaggaaatgttgtctaagatagatattctagttgatggccgctttatgaatgatttaaaggatttaaccctgcaattcagaggttctagtaaccaacgaattattgatgtgccaaagtcgatgaaggcaggcaaggttgtcatctgggataaattgcaaaaataagataaactaaagtccggaatgattttctggacttttttgctaggtgaaaaaatggaagaaaaaaatattaaacaagttgatcaaatcatgacggccttgacccaagtgattgatccagaattacaagttgatgtagtaaatcttggtctgatttatggcatcgatatcgaaggagataaggcaaccattaagatgactttgacaattatgggttgccctttatctgattatttggaacgacatattcaaaaagctgttctttcagttgctggaattaagtcttgtgacattaagttggtctggtatcccgtctggacgacagagcgtctttctagtgcagctaaaaagcaattaggtgtaactaaccatgatgatcaaattaagcaggagaaagccaccaaagagaagattatcgacttttcagtaccgatcaagaaaatggcagatgaataccctgactttgttcaaattatgtacgattgtggttttactagaattaaaattcctggattgcttaaaacggtggggcgtgtgatgaccattccattgggagcccaggcaatgaaacttgatttggctaaagtgaaaaaagcatttgaagataaaggatacaaggtaatcaatgactgataaaaaaagacaggatgcaatcctgaaaattttgcattatattcaaaacggcggcgattttgcgaccgcgaagaagatgtttcaagaagaattcgatcaggttgatgtggccgaaatcacagcggcagagcgcgaattaatcaagcaggggttaaacccagcagagattcaatacctgtgtaatgtgcatgccgatgtctttaagggtaatatcaaggagaatgcggtaaatcctgattttgctactccggggcacccggtgcatacgattaagctggaaaatatggtactgaaatcattggttaatgacgcactcttgccagatttgaaaaagtatcaagcaggtcaagatacactggataaaatcagaaaagaattgagtgatttggcaacaatcgataagcattaccgacgtaaggagacctcgctttttccattaatgaataaatatggcattacagctccgcccgaagtgatgtggggcgttgatgatgatattcgcgatttaattggggatgcaagcaagattgctggtgaggagcatccagataaagatcagttggctgaggcaattaaaaaggcgagtcatgaagtgcttgagatgatctttaaagaggagagcattatgattccgatgattgacgaggtagctgatcaagatgattggtacaacgttaaacgcgaagagagtcagattggctataccctgattcgcaagccaatgaattggaagccaaaggaagctaaaaaagaagcagggcctatttctgttagcaatctttcatccttcctcattaattttgaagaaggaaggttaaatttagagcagttaaatgcaattttggatatgttgccatttgcattgacctttattgatgaacacgataaggtagcttattttggcggcggtgctgagatttatccgcactcgcgcaatgctattggcaatgacgtattctcgtgtcatactgctaaaagtagaccgttaattaaaaagatttttgcgcaatttcattcaggtgaagttgacaagtatgagtttcactttactccacacaagatgaagcgctgcttatacctacgctattatgcagtacgtgataaaaatggaaagtatctgggttgtcttgaggtagcacaagatgtgacagaaattagaagctggactgaagaaaagaaaaaaatttaacttgttgggctgtgttctagtaagggatgcagctttttcttttgccctcgtgcaaaaaatcacaattcttgctagactagattgagagaatgattaaaaagaagggaagagagaaaatgcgcacagcacatggaaaacaaccagctgatgaaatcaaattgcattggcttcttctaggccaattactaacgtggttgggttccagctttatttggccattgacttcagtttacctgcacgaccatcttggcgtttcactagctttagtgggtgtcgttttactgttcaactgtgttgcaaatatgattgggtcatttatttcaggctggtgctatgaccatatggatccatatgtcttgctgattgtgggggctgctttagatgcggctgtcttgtttggcatggctttgaatcatagttggccgttatattggctctggatgactttaactggctttttgggtggctggaatggagcattgattaactcgattgctactagtattaaatctaagccaggtcgttatgtcttcaatatgatctactttgctcaaaatgttggggtcgtttgtgggacattagcagtaggttatctttatgattattcagtgactttattatttgtcattgctggtcttttgttcgttggcgtttgcgttaacgcaattattaattatcggccaatgattcagttccacaaggagcgtttggctaacaaaggcgaatcaaagaagaaggcctttgagccgatgccaaaatacaatctgattatgtcaattggcttttttgttacgatcgctgtaatttggttgatgtacatgaactgggaatcaaacttgtctgtctacatggtttctttgggcattccttttcatctgtatagtttgttatggaccatcaatgccggaattattgtcatcgtgcaagctatcttaagtcgttttactatctttaagagcttatttagacaaattttatttggcactttgatgtttgcaatttcttttgttactttgatttttgccaaagattttgcacatttcgccttatccatggttatcttaactttaggtgaagcaaccgcaatgccgtcgattccaacttatgtcaatgatctgtcgcccgattctagtaagggcaagtatcaaggcttaaccttgtctgcatcgtcaattggtcgagctctaggtccattatttggtggtttaatcattgaagatttcggctatattcaattctttgctgttgctgcaattggtatctttttgcttttagtcatgcttattccaatgcatgcgaaactacagaaaaaactaaaattatttgtaaaataaaaacaacatgatagcgttaatttttttataatgctatcatgtctttatatgaaaaatttttccactagggaggtaatttaatgtattttaacgtacgcggcggtgctggtgacattactaaggctaatacttcagcgcgtctacaagataatttatatttggccgttaactcagaatggttggaaaaggctaaaataccatctgatcgttcaagaaccagttcatttgatgggatcgatcttaatattgaaaagaacttgatgcaagactttgcagattttgctgctggtaagaaggaactgcctactgtgcctaacttcaagaaggcagttgagctttacaaggttgctaaaaactttgacaagcgaaatgcggatggtgccgcacctattcaggcagatttgcacgaaattttagacttgcgcaacttcgctgactttaacttgaaggcagcagatttttacaagaatggttttgccgttccatttgctttcagtgttgaagcagatatgaagaatactaagattcactcattgaattttggtggtccaagtactttcttgccagatacgactacttacaagactccagctgctgagaagttattggatgttttgaaaaagcaatctattaagttgttaacaatggccggacttgatgaaaaggacgcagaagattacgctgacttggcaattaagtatgacgctaagattgctaaggttgttaagtcaactgaagaatgggcagattacccagcaacttataatccagtttcattgactgactttgaagcaaaattcgattccttcaagatggattacttcttgggcggattatttaccaagaagccagaacggataatttcaactgaaccacgttacttagatcacgcggaagaattgttgaatgaagaaaactttgctgaaattaaggcttggatgctggttaagtttattaatggcgtagcttacagcttgtcacaagatttccgtgaagctgcctttccatttagtcaagctttgtcaggccaacctgagctttcaagtggcgttaagcaggcatatcatattactaatggtgacttcggcgaagtagtaggtgtctactatggtcaaacttactttggcgcagaagctaaagcagacgtgactgatatgattcacaagatgcttgatgtttatgaaaagagaattcgtgaaaattcatggctttctcaagcaactaaggataaggcaatcgttaagttgcgcgctttgatcttgaagatcggttatccagacaagattgaagaaatctatgaccgtttacaagttgatccaactgctagcctttatgaaaatgaagtgcaatttggtcgggaacaaattaagtacaatcttgagaaattgtaccaagatgttgaccgtacggtatggttgatgccaggtgatatggttaatgcatgttacgacccacaaagaaatgatttaactttcccagctgcaattttgcaaaaaccattctatgacttgaaacaaagtcgtgctactaattatggtggaatcggcgttgttattgcacacgaagtatcacatgcctttgacaataacggtgctcaattcgatgagtttggtaacatgaagaattggtggactgatgaagattttgctgaattcaagaagagaacgcaagctgaaatcgacttgtttgatggtattgaatatggccctgtaaccttgaacggtaagcaaatcgtatcagaaaacattgccgatcaaggtggtttgactgctgctgttgaagctaacaagggtgaaggtggcgacaagaaggcaatgcaagaattgtttgaaaactttgctcgtgtttggacaactaagcaattgccagaatcaattaagacgcaagtatctatcgacgttcacgcaccaggtccagaacgtgctaacgtgcaatcacaatgccaagaagaattctataaggcatttgatgtgaccgaaaacgatggcatgtggcttgctcctgaaaagagagtagtaatttggtaagtaacttttcttaatatcgagtatgaaaaattagctaaattacatataagctcctataataagaatgactacagtgctgctactacactgcagccctttataacttattacccattaataaattttttgcactaaaaaaggctccctgttgggagtcttttttagtttagtaattatttagttttagctgtcgagtaatcctttggcttaatccgcttaatgtaagatggatttggtcgacccaggattaatggtacacgctcgattacggtatcggcgtattctaagccgaaccaggaagctgggttagaagacaagttttgcaagcgaacccgcgcttccacaagccatttttcatagccaaccaattgtgtttgtggactgatgacgtcgttaacaataacgaatgagaagtcacctacgtcacgacctgggctggtggtgtattcctgtggttgtggctcaatcgtaccgtcggcgatcaagtcatgaacgatctgacgaatgtagacattcacactagtttgcttcttaaagccgaggtagagctgaatgttaattacgttcttcgtaccgtaagtgttaacagcatattcagcggtaaatggctcgttagtaacattgacagtgacaaaccagtaagcctttgctcgtttaggtcttttatccaaaattgagtacaggatttcacgtttgatgaacttattgtacttaacgttggccatgtaaaccaagttggtagcataagttgggtaattttcatcgtgacttaagttcgttaacatgtcggtatattcatctaagcgaacgtaagcattgcgagcttcacgcttgtcacgaaccttgttgccgtaataccaaacatacattatgaagccgatagcaccagcgatgaagagtgaaacgtaaccaccatgagtaaatttagtcaaacttgaaatcataaacatgatgtcaaggacaccgaagaagatcaagaagatccagttccaaacagtgttgactttcttcattactaaccattcataaagcaggatggtagtcattaacattgaaattgtaatggacagaccataagctgcttccatgtgagctgaagtttggaaatataagacgattgcgatagtagcaacacagatacccttgttaatggaaggaatataaatttgtcctttttcgttagatgggtagttgatgttcattcttggcaagaacttcaagcctgaagcttctgcaactaaagtgaatgaaccggtaattagggcctgagaagcaataacagcagcaatagtagccaaaatgatggcaaacaatctgatgttagctgggatcatttcaaagaatggattgagcacaccgccgtctgcaggacggtaagttgggttgttcaaaatccaaacgccttgaccaaagtagttgagtgacaagcaaacaaaaacaaatggccaagaaccaataatattgcttttaccaacgtgaccaacgtctgaatataaggcttcggcaccagtcgtagctaggaaaattgaccctaaaataaaaattccagccttattatatggactgactaataatctaatagcgtaaattggattgattgcttgcaagattgaccagtcaccgaccatgttcattacgcccattacacccaaaaaagtgaaccaaaggaacatgattgggccgaaggctttaccaatgatactagttcccattttttggatagaaaacagaactagcagaatgactacagtgatggcaataaccatgttttgagtagaaacgggtacattgccgccaaagttcagtcctttcagtccttcaatcgcagttgtaactgtaactgctggagttaaagtaccatcggccaaaatagcggctccaccaattagcgctggtagaactaaccatttagctcgttttctaaccaatgtgtataaggcaaaaatcccaccttctccgtggttagttgccttgagggcaataattacggtttgtaaggtagttagtagcgttacagtccaaagaaccaatgaaattgatccaatgataaagtcacgatttacattaccaatgccgccgttgccttcgacaattgatttcataacataaagcggactagtaccgatatcgccgtaaacaataccgatggcgattagtaagccggccgcactcatgcgtttagctttattattcattatctcgttatctcccacaacaaaattgtagttttaataaaaaaagaaaatgccacgatgacattttcccttattgtacctattttcgtctatttcgctggacaatgcaagtgagatttgtcagaaattgaatctagaatttggtgatgataaagttaatgcattataataaaaaatatgcagtaaaaaagctcccatacagggagcctttttgatataaattatgaaagtgatgaaggaatcttagtacgttggtcttcgtcccatttttcccatgcttcataagtaagcatttcttctggcttaacaccagtcttttcttccatggccttaagcaagtccttaaagttgtagtcgtggtattgtaacacatgatcaaccaacttcttgcgtgggaagtggatgttgtttaaaacatagcgattgatatcaaccatgttatgattttcatcgtaaaggttgataacttcaagatcgtcttcatcgaattcagcgatgtagaagttagcgaagacctttaagtaatcaggttgttctttgaattcttcctgtggcatagtagtcttgttagcttctggcattacgactttaaagtcgtcgttttcttcattttctttatcagcttgagcttgagcgttcttttcttcttcagtcaaagttgttacccctttatttataaataaatagatacaaagtcaataataattttacagacttctacaaataaaagcaaatagaagtggttgaggtaagtgtcaatgtttttgcggtagcctttaaaccattagtctaaccttaatttcttaaatatttatatgacttaaatttctgcttagcttgcttaaataactattgccagctacctgtgcggttaatgcgccatgctggatgcctaaatgaacttcatgacgcttctttaagctgtcacgggccgctgcttttaattcctgttcagtcaatacagttatttctgaatcttcaaactcgctgctaagccaaaattccagctctcgattcttgatgcagcttaagatcctaagcatgccttctgctccagattttgaccatttcttgccttgccccttaacacggtaggtatacttgcggtggttgctctcgcagcagccaatggctttagtcacagtcagttttcgtttcttaaacggcttaatatcgtcccaatgacgatcaatataattccttaggcgccccagataatcatgattgagctcggtattcaattcatcaattagtcggctttctgcagtggttaggatagttttaactttgtcatagctgtatttgtattccaaagcagaaatcagcttgccttgcaggtcaggcgcaaaatatagcctttctttgattttcttatttaggtgaaagacatccaagaaatgctcatgacgcttgcatagccctacaatgtcatcgaagtctgttttggcatatccagcaccgccatcggcgttgctaagaattacagtatcagaaagatcataagtattggccaggtactccttggcttcgttcagcgcatcaagtcggcttaaagaaacaaattccttggcattgattcgctttctgcgtttcttgcttatattgacaatgccttcacagacctgatagcgatgaaattccaaccggcttttagtgcctttgatcaccacgccatcgccttcaagatacaaaactgggacctttttcttagtgcctgcggcatcatatcttgaatctgcttcttggcccgctttaatatttttcccggccatttttaccaaattgcccacctgcatatggctaatattaaagccagacaggcaattgactgctagagcagtattgcgataagtggcaacgctgcttacttctaagatgtttttgactgctaaaatactgtagcgcttgtatttgtcaaagcccattaattcatccaagggataccttgcttgtttgcctgggcagacatatcttcttctgacatacctaacttcgccaaaagccatattgattgagcgctcattcttcttatcaatctgatagccctgtgctttaaccttggtaatcatttcatcatcaactttagctaaagccaaggccatgatttccttaatcaggtttaagaagaaacagattatttttctttcacgcttaatataattatcttcagactttataatatttgcgatttcagttacaattgaattcataaaagaccagcttctaatgtgttttttgttcttaacatcagactactggtctttttgtttgagctcaagtccaaattcaaaggacttgggcttttttaattatttattcaacttaccgtaaaaaattatacacttagtggttgagagatgcaaaagtatagaagtcagttttgattagtaaaatggagtaaaatgaagtaaaatataaatgtaaaaagtaaaatgaagtaaaatgaggaaaaatatgtataatgaaaatccttttgatgctgaatttggcgggatcccagagctatatcttgattttaatgatgatgcagttaaatttgctcaaagagcccatcgtctcaagaaacatccaacttattctctctttattacaggggtacgaggttcaggaaaaacagtttttatgaacaaagtgggtaaagaactaaaaaaatataaagatactatggtagtcactttgcacaattctgatgatctttttcgaatgatgtatatcaagctagtgcctatgctagataaaatcaaaaaatggacgccatcaatttctattaaagttccttttgtatcagtagatttcactgaagcaaatgaaaagcatgatgaaatatattataaagtagaaattaacaagattcttaaagctttgaacaaagtggggattcgtgttgcattttgtattgatgaagtgtcaaatacacccacaattcaaaaattggctgaggaattcaacgactggagcctaaataactatcaagtttcagtgattatgaccggactattaagtgaagtggcggaactatcaggcacacataatttaaccttcttggttcgggcggatagatttcacgtctctaaactatttgcgtcgtcaattgccagaacttacatggatgtattagacataacagctaagcaagcagaaattttggcagatatgtcaaaaggctatgcttatgcatttcaattgatcggagatttgatgtatgaaaatttaagtcaaaagatgacgtttgaaaaagctttggaatatactaaacttagattccgtgatgtacttttcaaccaagcgtatgatgtaattgctcatgaattaacggatgtggattttcaatttttgtacgctatggcgcaagataatagtattagttcaattattaggactatgcaaaaaagtaagcagtatgttaatagctatcgtgcaaaattaattaaatatgatctaattaagccaataattaggggaaaggtcggctttaccttacctttgtttagagatttcattcaagcaaagtatgatgagcttaactggggctagaatttattgaaaaaattcgacagaaaatcacagaaatgaacgcagatccagtttggagggatactattatggactatgagactaagctagctgaagagcgtgaatacggtgaagaaaaaggaattttaagtgcaattaagaaaattatttatcgtaaccggagctatggtgtatcagattccaaaactttggaggatctgacagaagactaccatgattctgtttcccgggatcaaattgaacaaatgatgaaagaagcctaggtctaatgaaaatagccgctgctcaatgtgagtaacggctatttttttacttgttatcatcagcagcagagctggaacttacggcagatgattgatcgttgcttgaggaagccgcgctggattggttgatggatgataatttaagtaattattcttttgaaaaaatatttcttacttgttggagtaaattatcgaattctgttgattcttttatgtggccgattatttttgcatgacgggcaatgaaatcatacgatagcatttgaaataataatgcatccccatttgtgtgactagcataatctagcacatagaatctaaatggatcatctgtaatatggttatgagtaattgctagtcctattactaatccagactttttagtgtaagcatgtctgctcactactaaatagcgtctacgaatatttcctttttcagaatcatgtccacccatttcgtgaccagcatgtggttcagcatcgatcattattatgtcaccttgatggacatcaatccttctcatttgctagttcctttccgacaggtttgacttctctaggattgtatcctaattcttggtattctcgctttatttcagtatcataatcataatcgtcataagcggggtctgaccataaatcataattgtttttagcaattcttttgtatacaatatcaccgtttttatttacatcaacagagaattctgtattaagtggaactttgatagtacttggaatggtaagcactattgaatttccttgttttctagccttgactaccataataagccctccttatgctaaaaatattttattatttaagtatatactgtgaatacagtgagcacaaacaaaaggagccacaaattggctcctttttcgtttgcttacttgttatcatcagcagcagagctggaacttacggcagatgattgatcgttgcttgaggaagccgcgctggattggctgctggatgattgttcctgctggtgatcgcttgaagaagatgaagaacttgattgatcatctgacttcttgtttgatgagctggacttcttggactgctctttatccttatcagatgaggattttgcagaatcatcctgactagaattatctttgttagaatctgcatcagaattattagatttttgctggtcaggatcagcgttctttttattggaattattataggaagtattattgtgcgtttgagtgttggcatggctaatgtaagcaccggcgccacctccacctaagatgaacatcgcagcaataacaccccaaaagactaatttcttcatattaagacaactctcccttatcttagaaaaaatattaacgaatttgagccaattggtgactttgaatcgttagttatagtgtaagacatctggccggcaggttgattacaaaatactcaattttaactaattattaagaggtagaagaaaaatatgaattacgaattaactgaacaatcaatccaatatgtatttggcaacaagaagtataagaatgggcaaaagacccgtaacttgaagaacgtaaagactggcgctaaggcagatgagttgcaaaaggtgggtcaagcaattgctagtttgcaagaagactcacttgatgaagcatacttagtgcagaagtcacgtcttgtaccagcagctgaataaattaacgaacatatttaggaaataaggagaaaaaatgatggctaaaactactaagactatgaagttaactttcttgaacggagaaaagaagaaaattagtattacgttgggggatgcagtcgataatctaactgcggatcaagtacgcggtgcgatgaacacgattgcggaagccgatgcattcgagaaagacggtgttgcatattatcacactcctcaatcagctgcatacattgaacgcactgttactgatatctttaatgattcagcagaatctgcagttgagcctgcagctaagcaagactaatctggacttgcttgaccaactaattagcttggtcaaaaggctcaggagaaaatatcgcaagatgtagagttcacacttagacctttaacagaaatcgtatagtaatattactttttcaattgattttgttacatcgttgtaaaatttaagaaaaagtaaagaaacagtaaagcgggcgtatgctcgctttttcttgttgtgtctaggattacggcattttgttattttagatttgtgtgaatggtattgggatagggaataggtgaattattacaaaagcaagattgtagtcaatttaacttgctattttttcaagaggttagtacaatatgaatcgtggtaagtaataggacgtgcttcaggcgtgtcgcctgtacgcatgctgatccttcagcaatgactactacctcatgagagttataaactcatggatcttgctttgaagaattttgtacattataggctccctacatgctgaacctatggcctattacattttttatatttcaaggaggaaaagaccacatgaagaaaaatttaagaattgttagcgctgctgctgctgctttattagctgttgctcctgtcgctgcttcagctgtttctgttaacgctgctgacaacaccgttgcaaccactaccaacacagcaaacactgtaattaatgctggtggtaccgcaatcaacactccagctgatgcaaaatacgatgttgatgtaacacctaaccttactgctactgcagcttctactgtaaatggacaaactattaacggtagcattactggtaacattactgctagttacaatggccaatcatacactggtactttagatactaagaatggtaaagtttctgtagctgactcaaagggcactgctgttactgatttctcaaaacttactaatggttcatacactgttactgtaagtggcgtatcattcaactttggtactgctaacgcaaacaagactatcactcttggctcaaagaacagcaatgttaaatttgcaggtgctcacggtaagtttgctgatactgtaaatgttaaacttggtcaaaatggtactttaactaccccaatctcagttcaagtttcaaacgttaacgcacttgacctttcaaatgctaacggtgttaacttctacaacgcttcaaacggttcacaagtaactaagggttcagttaatgtaactgctggtcttaacggtcgtttgaacgtttcaactgttgctagtgaaatcttaaagaactttgctgcttaccaagtttcaaatggtaagcctgtatcacaattgccagaccaaaaggctgtagttgctgatgttaacgctgctttaaaggctgctaatatttcagttgacaatgctggttggtttactgctccaacttcattctcagttaatgtaaaggcaacttcatcaattaatggtgttgacgctactttacctgtaaccgttaatgttgctaacggcaaggacatgactgtaccaagccaaagcaagactattatgcacaatgcatactactacgacaaggacgctaagcgtgttggtactgacaagcttacccgttacaactcagtaactgttgctatgaacactactactatcaaaggcaaggcttactacgaagtagttgaaaacggcaaactttcaggcaagttcatcaacgctgacaacattgatggtactaagcgtactttgaagcacaacgcatacgtttacaagacttcaaagaagcgtgctaacaaggttaccttgaagaagggtactgaagtaactacttacggtggtacttacacattcaagaacggcaagcaatactacaagatcggtaacaacactgacaagacttacgtaaaggcttcaaacttttaattaagtctatgtagtagataaggaaaacgaggcaaatgcctcgtttttcttttgctctgaaaaaaggcgccgcttacgcgacaccttggaagatattctgctgtgaactattgattactgtttactgatagactttatgtactagtttgataatttcatcgcggttaagcgtctcgccataactatttgtgagttcttgtagggctgtatctttagttccgtccattcgcttaatagttaggactagcttcttagcatcttctatttttacttttttagcaacctcattcatttcgtattctagcttgtccatgtcttcgacccactttccgctattcacgtaatggtcgacatccttttgcaagctggcgatgtaaccttcagggtgattgatgattccattcatgtaatccaagaagtcaatcatcttttggttcaggtcatgattattgcccttagaattaaaaactttaacgtgcgtaccagtctgaaattcaattcttcttattgctcatgacgtgaccaaagaccaaatcgtcagtgattctcggatatcgactttttattttaatcatattttacctcatttcaattattgttccatcacattacgtaatttacctaaaagctgctttttcaatcgtttcaacgtaatacgcggtataccgcattctttaactagctgcgtaattgtctttttctcaagcaaatgctcaaaaagaattacttgctcaagttgacttagtttcttaatctcattctttaaagctacaagattatcccatgcctctgttttacctaagtcataagccttgtcaattgcagtattgcgttcacatacgcgctgttctcggcgcagagcatcaattgtctgccaaagaacccttttgaagctaagcttattaatctcactgcgaaccttttgcccatctaatttgcgcaacatctcggcatacaaaattacaccttcttgcaacagatcttcatagagatgatagtccggtcgaacatgtgccgcctttaaggcaccaccaactaacttacgatttttccatgcttcttcgaaatatttttgacttgtcattgtgacactctcccaaatgatgtcacaagcgcttgtgcaatattagattagcaagattaattattgaaaaaaactaggtggtgggtcctcatgagcactagagccatgcaggtttgcatatttcaataaatgctgaaatcaagtccagcaatacctgactgagtacaattaatagtaaaaaaagtgcaaaaaaaatacagctcatgagagctgttaacgattatatctgatcttaataatctgcttagtaaaaaagcggtgttcacggtgcaaataatctaatggcttaaattctttcacaattgtaagtaggtgtaagttcaaaacatgattatagaatttgtctgctagctttttaaaactatcaatagtatacaagtccagttgcacataatagttggaattatgcaggattgagtcagaattaatggctgttacgcgaagattattttcttgcaacatatgctgataatacaagtcagaataataatgattatgaaacagatactgaccaattatcttagtaagattaggcttaggcgaatcaaaggcaaaattatagaccaagccatttttatcaagtgcaatactgttgaaaatagcttgatcatggcgtttaacgtggaagtctttaatccagtgcaagcaaatccagtccgtgaagaaatttccactaaatgcatgcattgaaaaataaagcacattgtacatgacaatcccttgatagatatcaactccagcctcgcgagctagcattctctgccaaatcatatcgcaatgtacggcatgccgcatcaatccttgcatcatggcatatgttgacttctgactaagcacaattccacgattcaggtcgaaggctaccgccttatatttgcctaagataggatgttgcttgaactcatagactgccaatgtgttcttattgagtcgatatttattgtcatacgtaatgtactgcgctagttgcgcgtcattctcaattctccatttggtaaggtccttggaccaattacgatattttatgtcagtgggcaagctaataatccccaagttacgttgcttgtaggctgacacattcatcacactccctatgtttgaatatatctatattattttgaatattgaatagtattatacaggatgaagcattgattgtatagctagaaattattatgctgaaaagcttattttttaattaaacagaaagctgcaattaagtctacgtaccaaactatcaatgtaggcaatcatgcagatatattgcaggatggcttgactaaaattataattaattcaaacggagttcctgatggaaccgagactgaaacattacttaatttagtcaaactcatgaaagatttgccagtacatggcgataaactttttgatagggcacaaaaacgcatcgaatcaatgaatgccgatccagaatggagggatactattatggactttgaaactagaatgcttgaacgcgagcaagttggtgaaaagaaaggccttaaaacaggtgcacttaccttagtcgcttctttgaaagatgttggctgcaatagccaacaaatcctgcagcaattaaagcaaaagtatggcaatgtattttctgataagcagttagaagaatttctgaaacagagctaggtcataacaataatattttctgaggatgtcgcaacagcggcgccttttttagagcaaaagaaaaacgaggcatttgcctcgttttccttatctactacatagacttaattaaaagtttgaagcctttacgtaagtcttgtcagtgttgttaccgatcttgtagtattgcttgccgttcttgaaggtgtaagtaccaccgtaagtagttacttcagtacccttcttcaaggtaaccttgttagcacgcttctttgaagtcttgtaaacgtatgcgttgtgcttcaaagtacgcttagtaccatcaatgttgtctgcgttgatgaacttgccagtagccttaccattttcgattacttcgtagtaagccttgcctttgatagtagtagtgttcatagcaacagttactgagttgtaacgggtaagcttgtcagtaccaacacgcttagcgtccttgtcgtagtagtatgcattgtgcataatagtcttgctttggcttggtacagtagttaccttagcgtttggaacgttaacagttactggcaaagtagcagtagcgttgttcttgtttgaagttgcaatcaaattgaaagtaaatgattgaggagcaacaaaccaaccttgtgcatctacttcaacaccagcagccttcaaagcatccttaaggttatttgagtagctaatgttgctttggtcagaaccaagttgagcagcgtagtatgcattacccttggtttggtttacaggaacagctgcaagaacttgtgaaacgttcatcttaccgtcatctgcaccagcgtacaattgaatgcttgctgaagttacagctgcgccagtagtaccattgtgccaagtaacaactgctgggttagcaaagtctttagcagttacgtccataacaacttggtataagttaactacaccattcttgtcaagttttacttcgagtgagtggctcattgcatcttgttctgtacgtgcagcccagccagaaccgaagttcaaagtaaccttcttgttagcattttgtgaaccaaagttcaagccaacattagtcattgaaaccttgtaaacgtcaccagcattagcttcagtaacttggtttaagtcagtgatttcttggctacccttgaaaagttgaatctttgaagggtttgatgcgttaacgccaaagttagcgttagcagtagtaccgtcaacagtagctgagaatgatactgaaatagcaccacttactgagccagccttagtatttaaactaatgtttggcttaacgttaacagtagaaccagaagctggtaaagttacattacccaaatgggttacattagtaacaggtgcagctgaaacagtagaaacagctgaagcagcgacaggagcaacagctaataaagcagcagcagcagcgctaacaattcttaaatttttcttcatgtggtcttttcctccttgaaatataaaaaatgtaataggccataggttcagcatgtagggagcctataatgtacaaaattcttcaaagcaagatccatgagtttataactctcatgaggtagtagtcattgctgaaggatcagcatgcgtacaggcgacacgcctgaagcacgtatattgtgtaatcgatttttgccaagcaatgaaagggtggtttttgtcctcttatttgcttggggttggttgggtgggttttgtccgctgcgcagatacttttgtgaaaaaagagtacgatgcgatttgatgatttagagtgtcgtttttggttttgttaagggatgcttgtaaaataataaggtaaagaaaatctaaagaagtaattttgtgaaaaagaaatcgacattttttgcgtacttatatattgtcaaaattaagatatgtaggtgataattatgttaaataaaaaggataaaactaaaattcaagaattaactgataaaacagtggacttgatcgtagaaaatatggggaaatcgcgtaaagaagcggaacaagattttcaaaagtcagatacatatgcgttcttatggctagcgaagcgtaatattgaaaatgagcaccctattattttgtacagaatgtttaattctgagttaaaagctaaaccaatagatgaagaacaacaaagttttattgactttatgactgataacacaatcgagttaattacacagaatactaattggggaagataaaaggcaactaaagttttcaaatctacaaaggtatattggatactagttcactcaggacataatttagatgaatcttctcccgaagagctgttttatatgtttagaaataaacttagtataggtaatccactaccttcatctacgctgaagttaacttattaaaaaatttatataagttaaataatattattacaaatgttacttttttacaataaatctgttgaaacgcttgtctagacctaatttgctagatacaatggaggtgttatattaaggaggataattttttatgaagaagagacttttgaccagttttgctgctgccgcaatgcttactcctgtagctgtgccagcagtaaatactacgatgatgaatcaagcctcaagccaacgagtttctgccgctaccgctgatcaaactgcatttttgaataaagctgctaagcaagctgtgaaagcagctaaaaaatatggaactttgccatcagtgatgattgcccaggcaataactgagtcaggctggggaaagtcaggattagccgtgaatgctaataacctttttgggatgaaggctgatgattcttggacaggtgagacttatactgccaagactagagaagaagataaaaacggtaagagctactatattactgctaagtttagaaaatacccatcttttgaacaatcatttgaagataatggtagtaaattaagaaatggtgtttcttgggatccgttgcgttataagggcacttggattgaaaatgcatcaacttatgcagctgcaaccaaggctttgaccggtacgtatgctacagactctaagtatgataaggcattaaatagtcatattactagttctaatttgactaagtatgatccagtaaccgttaatactactagaacttatactgctggcaaggatagttcaacttataattggccaactgctccatctgttgccagtgctattggctctgttaaagctggtgaaaaagtagtagttaccaagactattactttccatgatggttcaagcagaatgtatattgatggtcgtggttgggttaatggctcagttttggacaagagcagttctgcaactaaggaaccagtaactcaggcacctaagaatgtgccagctgtttctaagaacttgatgcataatgcctatgtttatgaccaaaatggtaagaagctaaagggcaagatgtacaagaccagtgatgaaaacggtggtaagtggatcaatacttatggtaccaagaccatcaagggtaagacctactaccgtgtcggtgaaaatgaatacattgcagctggtaatattgatggtagcctcagattcttgaagaagaatgcttatgtttacaatcaatatggcaatcgcgataacaatttgaagcacaagaagaatagccaaattgctacttacggcagtgctataactatcaatggtaagaaatactataaggtaggtattcgtcaatacgttaagaaatcgaacttcatgtaattaaggaaagggctttgttgtgaagatacgcaaatttttaattgccttaattgcgcttttggggttagtcggcgtatcatcggtcagtaaccaggtcaaagccgcttcgattaatactttagcgaagaaatatcaatatagtggtgtcacctatttatacaagatgctcaaactagaggggattaagtacaataaattccctggtgttgagtatcaaaatggcaagccagaaggaattgtcgttcatgagactgacgatcccggagctactgctcacgatgaagcaatctactttaaccgcgagtggaaaaatatcaacgcttacgtcaatgcttttgtagatagtaagcaagtcatccaaatgtattcacctaataatggtacttggggcgcaggaccgaatgccaacaatcgctttattcaaattgagctttgtgaagaagatagtcgtgatgcctttgctaagtcagttaataatgatgcaatttatattgccaagttgcttcatcgttacaatttaaagccagacaatgcttgcgatgatggtgaaggcacaatttggtcacacaaggcggttagcaccttcttaggtggaacagaccacgttgaccctgatagttattttgccaagtgggattacgacatggatcagttttattctttgatcgagtattactatgacttgcaaaagaagaatgaaaatactgatactaaggatccaaataagattaaggacgaagtaccagcagaagttcaaggtgcggtaactttaggtcacgatgcttatgtttatgacaagaacggcaagaagaccaagatcttgaagttagctggtagtccggtaaccgttttaggctacaagataatcagtaataagaagtactatcaaattggcaagaacgaatacgtagtagctactaatattgatgctactgctagaactgttaagaagaatacatatttgcggactcgttcaggtcgaattgaaaaaggtaatttggtcaagaagggtagtcgggtcatgacatatggcagcaagattacaattaaaggtcaaaagtattatgctttaaatgctacacaatatgttttagctagcgatattaattagaaaaatacgtcttaaaccataaataatgggaattaagacgtattttttgtataattcttgtgttgaatgtgaaaaggggagaatttaatggcgcaattatcattatttttggtcgtcttattagcgctcgtaattccaatatttatggcgcgtttcaaaataagcactgtaccaacggcgattgctgaaattatcgtcggaattattgtaggttcgagcggatttaatatcgtggtttcgatacatgatttaacatttttatcgaacctcggcgtaattttgctgatgtttttatcaggaatggaaattaattttgacctgctacagcgcaagaataatcctaaggctaaatcacaggcgggaaaaactgtcgatccgttgccaacagctttaacagctttcgctggaattgtggtaatggcctttgttttggcatatgttttaaagctgatagggctatttagcaatgttatcttggcagcgattatttttatgaccattgcattgggtgtagttattgctaccttgaaggaaaaggatattcttggccgaccgattggtcagacaattttgttaactgcggttttgggcgaagtaataccgttgctcttattaacgatttatgcctcagttaatggagggaatgctggccagctttggttgattatcttactgtttatcgctgcgattattcttttgcggcggtttaagcaaccgtatttatggtttagcaaagtaactaaggcaacgactcaattggatattcggttagccttcttcttgatttttgctttagttactgtagctgagcgagttggtgctgaaaatattttgggagcattcttggccgggatggtaatgaaattattggaaccaagcgaggcaactaaagataagctaacttcaatcggttatgggttctttatcccaatcttttttattatgactggcgtgggcttgaatttaaagtcactatttgctcatccatcatcattgatgttgttgccagttttggtcattttcttgttcttagctaaagctcctgtagtttttctttatatgcgctattttgaaaaaaaaaatgcctttgctggtggctttttaactgctactacaattacgattgttttgccaactctacaagttgctagaaaattgcatgcaattacttcaacacaatcagatgcctttatcttagctgcggttattgtttgtatcgtgagtccgattgtctttaattcaaactttgttttatcacctgaggatcggatgaaagaaactgttactattgtgagtgccaatacttttacggtaccagttgcacatgatttgcacgataattggtatacgatcaagatgtttaccgatcagcaggaccaatacgaaacttatgatagtagggttaaaggtttaacattacttgataatttggataatcaaagcttagagcgtagtggtgcctttgattgcgacattttcgtagctgcagggcatcatgatcaagaaaatgcacgaatggcggaatatgccaaagacttgggagtcaaacgagcaattgcccgaatgaatgaagtcgatagcgatacgatggctcgatgccaggaggcaggagtagagttgttcaactttactaatgtacgttctgctctgatgcgagctttgattgagtctccaacggtctacaagattatgactgatactaacaatgtgttgtactcagttaaggtgagaagtacttcctatactggacgaccacttagggatctggaatttgtggacaagattacggttagtcgaattcggcgtggtgatgagtggttaataccacacggttggactgttattgagccgaatgatatcttgatcttttctggagaatttaaggttgctgatcgagtaaagaagttacttagtcatcaaaattagagataaaaagaggctaaatgcaaaaatcctgcatttaacctcctttttacgtaattaatgattttgtccttcaactgcttcaatgtcgccttgtccatcgcgctcaacaatagccccaattgcagcgattaagcctttaacaatatcggctaatgccattgatggagtgcttggtcttttgacaacttgttctggcaaaaatgggatgtgaatgaagccagctttaaggctagggaattctttagctcgcatgtattgcacttgataaaagatgtggttgcagacgtaagtaccggcagtgttggaaactgtagcaggtagaccaacagcgcgaatcgccttagccattgccttgattggtagttgggtgaagtaagccgtgtcgccatcggcttggataggttcaccgagcggttgataaccatcgttgtcggggatgcgaccatcgttaatattaatagctactcgttctggggttaaagcagcacgcccgccagcttgaccaacattaagtacataatctggtttttcttgcacgatggcatcatgaacaacttgggcagatttattgaaaaccgtaggaatttctaatttgataatttttgcacccttgattgagtcaggtagttttttgactgcttcaatggcggggttgatcttgtcgccaccaaaaggatcaaaaccagttactaaaattttcaatggcttttcctccaaatttaaatcatagaattttttgctttagtcaaaatttgcattgtctctaaagtattgacaaatgcttcatccgctttttgcgtatcgtgttgatcaatcatctgggcaaaagtattaaattcagctgccattcggtgcggatatttatttaaattataacgcttaggttgctcatttctcatttcaactgtgaaattatcaagtgttcccgttgagccgtcaaaatagatactacctttttcaccttcgataaaagaacgtggcgttacatagctatcttttgatgccgtgagggaggcttgtttgtcaggataagagaggtgaagaataccagaagtatcaacgcctttttgcatgttggcataatattgcacttgatcaggcaagccaaacaatgccgagacaagatgaatgttgtagatatttaaatccattaaagcaccgccatcttttttaggatcaaaaaccggcgcaattttgccttcaagaaaggcgtcatagcggctagaatattgcgtataatttaagttaacaatatgaattggtgcgatcttgttcaattctttttggatttgtttgaagttttctaaataaaggttagtaattgcttcaacgatgatcaaacccttttcgtcggctaacttttttaattcttttgcttgagtggtgctctgaacaaatggcttttcacagattacatttttatcgtgttctagagcagctttagcaatctcataatgcaagaagtttggcaccgctacataaactgtatcgacttcagaatcagccattaattcttcattgtccgtataagtacgtttgatgttgtactttttagctaattcccgggcaatattttcactgcgcttagttgaggaaatagccgttacagtcatattcgcaacttgatcagcggttgttaaaaagtcatggacgatcatgccgctgccaataattcctaatttcatttttttgcctacttctttttagtattagtggttggtaaatctttagcgttagttgcagagtctggtactcttaagaagtcatggctgccgaagttgccataactttgaccaactttaacgtacattaatttacctagtttcatattaacaaagacattaaaggtagataatttattacctttaattacagccttaacattcattgattggtacttgcctaattttttaatttggctgaaaattttagcttgatttgtactttgagcagtagtgtcaaaaattggtgctgctgcctttttcatcaaagcttggtcagtacttttagcagttaaagtataagtgtaaacaccatcttttttgctttttttcattttataagcagaaaccaacttatcacttggattggtgatcatgtggttattcatgatggcatcggttaagtcggcataattatgaccggttagtttttcaaggtcagccttgtaccaagtatcttgtccattaatgtagacattgttaaggttgacccattcctcagtagaactagttttacctttgctagtggtttgattggtgatgtggtaaacagtggttttaccaccaaaggtagtgttagctaaggcaacttgattagaagtgtcggtacccagagtaacagattgaataacctgtcccgacttgaagctacttttagctttttgtacaacttgagtcttagtcagagctgaagtagccttcttctcttgtttactgcagccacctaataaaaagaagacagcaaaggataaaccgataatcgttttcttaagtttcatttttttctcctctatgcttcaataagtctattataactaaaaagtccgttgctcgttggagttacggactattcttttactttattttgtattaattttgcctaaatctacggccgatttcttgatagaagcaggtaccgtcaactttttgacttgattaatttgatcaatctgcatggtgaaattctttttgtgtccttcatccttataagtagaagtcacattaacatttttgatgtcgtaattctgatctacgttaattttgatttcgttgctaattggtttaacatcatcaagatcgatgccgattaaagcagtaaaggcagaatcagatacaattgcgttccaaatttttttgttatttcctttataagtaagcagataatcattgccgttttgctttaccttaaaatattttgcgttagggatgaaaggcatgagtaatgtgccgttcaaattgtcggtaatggcaccataggcactagtcttagacaactttgtcttaaaccaacgctgagaattggtacctttcatttggatatagttgcttttaccctcaatccacattttatagtgattagagctgctagaaacattagcataaataatcgttggctttttagtatattgggcttcggctttttgcaaagacttgccattgcttaattcattccaagtagcgtgcattgaactgaatttcgttttttccgcactggttaaaatcgtcttggcagtaggtaaattagctgtcttttttgaacctgtcttagagcaggccgttaaaaagagtaatgctaataaaacggtaatgataatattttgatgtttaaatttcatacataactttctttcattaaattttttcttctagtatagcaagaataacgttacaaaattgaaaaaacacgatttttttagtcttaactctatgaaaaaatttgtgaaatgtgtaaaatatggatgaaacattgaattttaaaaggagatatttcatgtcaaaattagttttaatccgtcacggtcaaagtgaatggaacctttcaaaccaatttactggttgggttgacgttaacctttcagaaaaaggtgttgaagaagctaagaaggctggccgtttaatcaaggaacacggtcttgaatttgaccaagcttacacttcattattaactcgtgctatcaagactttgcactttgcacttgaagaaagtggccaactttggattccagaaactaagacctggagacttaacgaacgtcactacggtgctttacaaggtttgaacaagaaggctactgctgaaaagtacggcgatgaacaagttcacatttggcgtcgttcatacgatgttttgccaccagctattgatgatgacaacgaattcagtcaagcacatgaccgtcgttacgcaaacttggacccacacatcgttcctaaggctgaaaacttacacgtatgtcttgatcgtgtaatgccattctgggaagaccacattgctccagatttacttgacggcaagaacgtaattatcgcagctcacggtaactcacttcgtgctttgactaagtacatcgaaaacatttctgatgaagacattatgaacttggaaatgaagaccggtgaaccagttgtttacacattcgacgaaaacttggatgttgttaacaaggaaaagttggacgactaatttattaagtagttattcacacaaatagaacttcggcgtaagtcgaagtttttttatacaccaaaaaaggcatcaccgttaagggatgccttctttgtatcaacttgctccaaaaactataattatttctttgatttcataatttttttggaacaacttcattatattataaataaagaaagatcgccatttttttctaagaaagtgctaagtgtataattttttacggtaagttgaataaataattaaaaaagcccaagtcctttgaatttggacttgagctcaaacaaaaagaccagtagtctgatgttaagaacaaaaaacacattagaagctggtcttttatgaattcaattgtaactgaaatcgcaaatattataaagtctgaagataattatattaagcgtgaaagaaaaataatctgtttcttcttaaacctgattaaggaaatcatggccttggctttagctaaagttgatgatgaaatgattaccaaggttaaagcacagggctatcagattgataagaagaatgagcgctcaatcaatatggcttttggcgaagttaggtatgtcagaagaagatatgtctgcccaggcaaacaagcaaggtatcccttggatgaattaatgggctttgacaaatacaagcgctacagtattttagcagtcaaaaacatcttagaagtaagcagcgttgccacttatcgcaatactgctctagcagtcaattgcctgtctggctttaatattagccatatgcaggtgggcaatttggtaaaaatggccgggaaaaatattaaagcgggccaagaagcagattcaagatatgatgccgcaggcactaagaaaaaggtcccagttttgtatcttgaaggcgatggcgtggtgatcaaaggcactaaaagccggttggaatttcatcgctatcaggtctgtgaaggcattgtcaatataagcaagaaacgcagaaagcgaatcaatgccaaggaatttgtttctttaagccgacttgatgcgctgaacgaagccaaggagtacctggccaatacttatgatctttctgatactgtaattcttagcaacgccgatggcggtgctggatatgccaaaacagacttcgatgacattgtagggctatgcaagcgtcatgagcatttcttggatgtctttcacctaaataagaaaatcaaagaaaggctatattttgcgcctgacctgcaaggcaagctgatttctgctttggaatacaaatacagctatgacaaagttaaaactatcctaaccactgcagaaagccgactaattgatgaattgaataccgagctcaatcatgattatctggggcgcctaaggaattatattgatcgtcattgggacgatattaagccgtttaagaaacgaaaactgactgtgactaaagccattggctgctgcgagagcaaccaccgcaagtatacctaccgtgttaaggggcaaggcaagaaatggtcaaaatctggagcagaaggcatgcttaggatcttaagctgcatcaagaatcgagagctggaattttggcttagcagcgagtttgaagattcagaaataactgtattgactgaacaggaattaaaagcagcggcccgtgacagcttaaagaagcgtcatgaagttcatttaggcatccagcatggcgcattaaccgcacaggtagctggcaatagttatttaagcaagctaagcagaaatttaagtcatataaatatttaagaaattaaggttagactaatggtttaaaggctaccgcaaaaacattgacacttacaagaaagtggtgaaaattgacagttgtatatgataagtgctattttgagttacaggagtgtagaaattgggagaaaaatatgcaaacaatcgataattctctctttcaagtctctgtcgatgagaatggggcccggatggcacatctggtgtctttaacagatcaatttgattatctcggcgagcaagaaagtgaagaaggtatggcacttgcttttccagtaatggatcaagccgataatttggctaacaagttgccttggaccgttgttgacaaaggtgatactcgcgtaagtctaactttaattgatacgccggagagctataagatttttccatatcattttgaagtaatgactacttatgctttggagggtaatcaagtcaatatatccttttatttgaaaaattcttcaaataaggaactgccattttctttgggctttatcttaccaacttcttggcaaagtgaaagccaggtcaataagattagtttgactggcaaagaacatggcattgatcttacttcaactgattttaagttgagtgcaaaagaaggaagcgttacagcttttacggataaaattgaattagaggcaaaaagtagccgtaattttgcgttaagcttgactttgaagtaaaaattagtaacgattttaataagatatactaagcaagtcagcgatgatttgctttttttgttataatacattcaatgtgaatttacatcataataggtatattttatgaaagatagaaaacaaagatctaatcacccgcataatagtcgggtagacacacacagttataaaaatcgtcatatttgggtctgggttattagtatcgtagccttgcttgcggttgctggagcggcgtactttgcctcagtttatttccgtactaagtcagcggttgataagacctatgatcctaagactgcagtgaaaactacaggtgaatttgatggaaagaagaagttcgctgttttactgatggggactgatacaggtgcccttgatcgaactgaaaagcgcggccggactgataccatgattttagctgtagttaaccctgctaagaagcgttacacattggtctcaacaccgcgtgatacgatggcacagatggttggaagcgagagcttcaagacagaaaagattaacgccgcttatgaattaggcggggctaagatgtcaatggattcagtttctaagttaatcaatgtgccaatcaagtattatgccgtggttaacatgggtggaatcatgaagatgattcgctatgttggcggaattaatattagaccaacgcttagcttggaatatggcggttatatttttaaaaagggcaagctgacccatatgggtggtgcaggtgcgctagcatattctagaatgcgttatgatgatccgcgtggagattatggtcgtcaagaacgacaacggcaggtaattaccaccttgatcaagaaggcagtttcaattagttcattatcaaatctggattcaattttgacttctgtgtcaagcaatgttcggactaacttgccatttagtgcgatgcagcagattgcgatgaattatcgtagttgtgccaattcgtcatctagtgattatctacatggttacaatgcaatgatcgacgatgcggcttatcaagtacagccaactagtgaattgcaacggatttctaacctggtgcgcaaagaattagggttacctaaggaaacgatttcaaataatgaaactttccaaaacgaaaagaatattgcaaatggctttagctttaagagcgaaaaaacgcagcactatcatatctatgattacaccgaagaaggtgataattaatggcgcgcatttgggctactctgattggctacgtttttggaaatttcttaacggcgatgatcgttggcaaaatctttttaaaaataaatcctactgaatacggttcacataatccaggaacggctaacatgggtgctgtttttggtaaaaaatggggtattttaacctgtttaggcgatttgcttaaaagtttaattgccttgtttattgtatattttgcttttccagctcatattaatattgcttatacagggctaggcctgatcttaggacattgttttccaatctgggatcattttcgaggtggcaaaggagttgcggttgcagctcaggtagcagttttttataattggaaagctggctttgctactttattagtggctttggtattaacagcaattatgcaaaatttgacgattccgcctttagtgtttatgcttttattcagtataaatacattcttgcataatcaagaagcaggatttgtttttatcgtgattactttgatcatgtgctttaagttctggcatgatatcgtagactttttcaccggtcatggcaaaaaggttgatattctgctttcaattaaaaagaagctagggatcattaagtaatgacagaaatttttagtgaggacacagactagagaaaatgagtgagattaacaagaaaaaatcactaaatgctcttcaaatcatttgtttgattgtcgcagcatttttcatgctagtgcagatgtattcttggggtagcacttttggtagattaccattaagtaccctaatgagatttattccaggactacttggtcacagtacgatggtactagtaccaatggtctttggtgctgtttatagcaaaagaaaagttcatccaactgaagcctttaagttttggattatagcggttgttacactagtgcttttatacttggtgaacttctttaaacgaccaggtacctttaatatgtggaagctctggggagtatttttcccagttttgactagtacatcagtattgttggctggcttgatttttagtatgctagttcaaccatacttgtatgaattacaacatcgcattactactaagcaaaatgtattattgcttagcacattaactttgactggttttgcgactagtgcaggtacaatgatctttaacaagtcaatttatggcatttatttgatcttgtactttgcttggggaatgtttttagctaacgttaaaattcctaaaaaggtctttggctggtcaattgcagctggagtaatgtctttcttcgtaatgtttatcggtgttcccggatttaatggggtttactggtaccaacgattatctggtcgaagtggcgtttattcttggaatcctaaatttttaagtaatattgcttcaccatttttgttcttaatggttttagcagccttcttaatctttagaaaagtgattgttagctatagtgctaagcagatgcacttctttattccagtaattatttttatggacgctccaattattggtggttttgttaaatcgttccgctttaccaatagcgctggatttaacaagttcttgatgattgtcatcatgatgctagctgcctggggcttaagctggctatatgagcgctatttattcaaggtgaagccggttaaacggacggttgcttttttcaagcaacataataacttagcagaaattgttgaagatgcttggactaacttcactgcttggatagttgaaaatcgagtacgactacttacatggggctggttctatgtattaagttttgcttcattcttaattgaatcagataatctgcggatccaaattacgactgcaactgatatcaatgccgtaattttcttgctcgggactagattcttcgctattattttgacagcaatcttccttgatgcaatgtttgcaattttctacttcattactacgcgttactggacttcaacagttttagtaactgtaattacaattggttgggctattgccaacaagattaaattagatcttcgtggggaaccaatttatccaactgaattagacgaaattgttaactggaagaccttgatgccaatggtcggccaacaaaagataattatgatcgctattgccttagtaattatcattgcattgactgtctttcttgaaattaagtttccaattaagaaaaagggctcatggaaacgccgtggtatttgggcattgttgagtttgcttttgttcatgacaccagtgcgctttaaccacgatggcggaattatttatcacattaaccgtggctttgataataagcaatcgtttagaaaccctgaacgtgatattcaaattaacggtccattattgaacttcttgaattactttgacttgcagattatgaataagccaactaactattcaaaatctacaattcaacatttgaatgagaagtacagcaagatcgctaatgaaattaacaaaacaagaaagaatactctaaagaatcaaactattgtttacaacttgagtgaaagttttgttgatccatatactttcccaacaattaagattgatccaaaaactccaaacccagttaagtttatccaatcaatgaagaaacgtgccacatacggtagcatgcttagtgccggttacggtggtggtactgccaacatggaatgggaaactttgaccggattcaacatgggtatgttcaattcaactttgactccatatgtacaaatcgtaccaaactacgacttctacccaaccattggtatggacttcaactacaagtcagctgttcacccattcattggtacttactactcaagagtagaagactacaagagatttaagtttaacaagttcgtttaccttggttctaaatacaagatcattgatcaaaagaaacttggtaagagtacttacaactctgacttcactgcttatgctaacggtttgagacaaatcaacagcatgaagggtggtcaatttattaacttgatctcaattcaaaaccacatgccttacaacaactggtatccaaacaatgaatacatgggcaaggtatctggtgaactcttcaacactgccgctgttcgtgagcaaatggcaacttacatcaagggtacgcaatacaccaaccaagctgttaagaagtttattggtcaaattgataagatcaagaagccaattaccattgtcttctacggtgaccactacccaagtatcttgtcacaaaactacactggcaaatatcctgttcaaatgcactcaactcgctacttcatttactcaaacaagtacgcaagacaacacggtgctaagaacaagttgactcacaacactaacttcgtcaacactagtgacttcactgctatgatgcttgaacaaactaacactaaggtaactccttaccaagcacttttgactgaagttcacgagaagcttcctgcaattaccattaactttaatggtgacaaaggcttccaattggttgaccaaaagggtcactttgtagatcctaagaagttgacttcagaacaacaagctatattgaacgattacgaaatggttcaatatgatatgaccgctggtcaagcttatggcctaaaagctaagggcttttacaagatcggtgactaaataaaagagatcgaacgtaaagtgatacattccctgtcaagtagacagtagaattacataaagcttttattcctcagttgattaataatcagctgaggattttttggcttctcttattttcttttcgtgtattttttgccagtatttctcaattcgatgatttggtgcaatagggcaattcttaatattgcctttcatcgcttctttgcgcatttcaccagcagttaaaccgttaaaacgtttctgtggatcttcattaatgtagtaatctattgtcttacaaatagaatcattaagttcatcataactggccacttgaggatgaagaataactcgcatttctttgataatgccttgccagccttccattggaccattatcaatacagcagccaacacgagacattgattgcgtcatgccttggtcttctaattggttttggaaaggtgcgcgagtaaattgaaaaccacgatcactatggaaaagcggatgagcattagggtatgctttaacagcctgcttataggctgcttgaactaaagcagtatcgtttcgtttactaattgcgtagccaacaggatagcgatcatatagatcaaacacagtacatagatatgccttaggcaggttagcagcaacgacttcagtgatatctgtacaccatttttcattaggtctagatgcattaaagtctctttttaacttgttttcggccgttttctcaggcgttgtatgcttgaactttagcttctggtatctaggcttttgtgatctaatgccattgatacacatcaagcggtaaacagttttatgataaaccggcttttcatcagacatctgtcgattaactgccatggtcatcttttccgtcccaaacagactgttgttagacttagttatttcaatgatctttgcttcaatctttttgtctcgttcttcacgcttactcggcttgcgcttaggatcaaagtatttgtaataagctgagcgtgctattttagcccatttgcacattaaatcaatcttccaattgtacttttgatggcagtcatggattaactgatatgtttcttgtttccagcgtctttttattgcggcttgtctgtatcttggttgtccggcaagcacatcctttctaactgatctaatttttttaggaattcgttcttagtttgttcttctttgagctgacgctctaattccttaatttttcgattagccagttctaactcagttagctcttctggcttcttatgtctgcctcgtttatctgttaatcctgtttcaccattagctagatatttgtgtgtccagctgtaaacctgctggtaagaacaatcaaatttgacagctgtttgagtgtaattcttgtcgtgattaagacagtattgaacaatctgaattctttcttgctgggtagtttttcttcttgctttagtcatatagacctccggatggggatcatagtcccgattttctatatgactattatacttggaaacccattctgatactgttccattgcttctaatgccatatttattagctaaagaaggtaacgacattttgccagctaaatattcttgaacaaccttttctttaaatgccttagagtaatgattattgtattgagcattacttagaagggtatcacgattgctttgatattgatgaacccatcttcttacttgcatcgctccacttttacttggcatcttaagccgtttagctatttcaacgctgctcctattaccattcaagtattgttcaactgcccatatcttttgatcgaatgaatatttactttttctggacataaaaaatcccacctccatggataattgaatactttatgtatttaaatcgtccactttagtgggattgtatcaaagttcggtcttttttgtatccaatgataaaataagggctaagaggaataactgataattagctgatttaaaggtgattagaatgaaaaagataataacaatggcactagccagtgctgcactatttggatcttctgcaacaactgttcaagctgggacatataatcctaagaacattaccagttttaatattaataggcgtaactatgtagctaagggaaagatttataaactccatttacccgcagctggtagattagttactaatggcaatgttactttaaaaaatagtatggaatggacctgtattccttatggtaaggacaaaaatacgtattatctgcgtaaaggcacatattatttaactagttcaaagaatattagtgtgaagactacttatactcgtttaactaagatccgtaagaatttagaaacttacgttgaaacaaagaagaataatgacaacagtagtcttaaagctagaaagattgaaattggtcaagatattaaagcaatgggtgaagtgtacgattacgatagtgtcgactactacacatttactattgactcacctcaaatggttacgatgaggatgaccaataatccgatttatcagcttggaaaaggtaacattttcagcaagatgaatgtaatcatgttcagtgaaaataatccagttggcggtagtacgatgctttacccagagagtttcgaaattaatggcaataagattgctagtcaaagctggtacttgtctaaaggaaattatacttttagtgtaaatactcgtggactttataattttcaattaacggctgttcctgatacgcgtgtggtaccggcagatactgagatagaatctttacaaaacactaaggatggtgtggttgctaacttaagggatgcacgtcatgcgaagacttatgaacttgcatggcgtgaaaaaggctcaaaggcagctccattcacttctagtagcaatactacagaagtaagtactgcacctgctacacgttacatagacaaaaatgatcgtaaaatcccagtttcaattggtaaaaaattagttaatggtcaaagctactattttgtagctcgcggtgtaagcaatcctgattacattcgttacggcaatccggaaaaagataattattttggtgcttggagtaattcagtagaacacacttactatgcaccttcagatgcaacaccaggtgcagttgatttaaccactgctaaagctgacagtacttatcacaacattcatgtggcttggaataaaattgctagtgcacaaagttatcgcattgcctaccgccaaaaaggtacaaataagtggtactatgaagtaactgatcaggctactaacgcgattactggtattactagaaatagaaattatgaagtgaaattgcaagcattgaatggtgaaaaaactggtccatggtccgcaattaaaacaatttttgtaaaatagcggttgactaaaactatttttctcgttaatatcataactaacaaatgagtagcgagtcggctcagcgttcagagaactagcggttggtgtgagctagacaggccgatttcagcgaagtacttaatagggttgctcctttaccggcttgaataaggcgcagcagcgcaaacgtgggtggtaccacggctaataatgtaatttagtcgtcccttggtcttttgaccaggggacgttttttattggaggaaaaactatggcaaaatttgatattttggaagatttaaaatggcgtggtgccattaatcaagaaactgatgaggaaggtttgagaaagtacttagcagaacatgacgatttggcattgtactgcggtactgacccaactggtgattcccttcatattggacaccttattccattcatgatcttgaagagattccaaatggcgggctaccatccagtaattttaattggtggtggtactggtgcgattggtgacccatcaggccgtaagactgaacgtactttacaaactgcggaacaagttaagcacaatgaagaaagcttaactaatcaaatgaagaagttatttggtactgaaaattttgaaattagaaacaatgctgaatggctaagcaagcttaacttgatcgacttcttgcgtgattatggcaagttcttccaagttaacaatatgattaacaaggatgttgtagctagccgtcttgaaaatggtatttcatttactgaatttacttatcaaattttgcaagcaattgacttctaccacttgaataaagatgatggtgttcaacttcaaattggtggtagtgatcaatggggcaacattactgctggtattgatttaatccataagcttgaaggcgcggatcgtccagcctttggtttaactattccattgatgcttaaggctgatggtactaagtttggtaaatctgctggtggtgctgtttggcttgatccagaaaagactagtccttatgaattttaccaattctggattaatcaagatgaccgtgatgtggttaaatacttgaagtacttcactttccttagccgtgaagaaatcgaagatttagctgaaaagactgagaaagaaccttggaaacgtgctgcacaaaagaagctggctgaagaagttaccaagtttgttcatggcgaagcaggtcttgaagaagctaaaatgattactgatgccttgttctcgggcaatatcaagaacttatcagttgctcaaattgaacaaggcttgaagaatgctccaagtgcggaagctggcaatgaaaagaagaatattgttgatttcttagttgacactaagattgaaccttctaaacgtcaagctcgtgaagatgtaaagaatggtgccatttatgttaatggcgatcgtgagcaaagtactgatttcgaagttgatccatcaagtgactttgatggtaagtacgttattattcgtaaaggaaagagaaagtatactttagttacaattaaataattaaatatatgattttaacattttatatataaaaatagagggattttttcctctatttttttagctaataatcggagatatttactaccaactaatatttgtaaaagataatgatttgtgtaaaataatattttacttcttaaattgttattttattttctaaaatcaattgctacaatctatttattaagttattcacaaattcacattattactatacgatttactgcttcaagtgcaataccaacataaaatagctgcgtataccttttgcaaatgctgatgcaaagcacttgattaaaaaactgacttttaataaaaatatgtgaaaagcagcactatctactttacttataatcaaacagtgttatagtaatagtgtaaagagaaagtaagtaaatagaaagaggttattaaaatgttagaatctaaaaaagctattaagattatttcaagtttggtaatcggtttgagtttaggctgtgttcttactcctattgctcaagctacttcatttactgctcctaaattgggtactgcaacacaagctccaaccaatcctgctattaaaaagggtgataagatctttgttgttattaaagacaccaaaaatcaaaaagtagctgtttacaataaaaatgctgaaaaaactagcaaaaaagttgcaatgggttctacttataccgcaaaagacgttaagaaggttaataaaaagaagattgtcagaatcaacaagagtcaatggttgaatattaaagacgtcgttaagaactaaataaaagcaaatttaataaccgttttgaatacttattttctaaaaatacttggagagaataaataaggacgaggactaagtgtataattttttacggtaagttgaataaataattaaaaaagcccaagtcctttgaatttggacttgagctcaaacaaaaagaccagtagtctgatgttaagaacaaaaaacacattagaagctggtcttttatgaattcaattgtaactgaaatcgcaaatattataaagtctgaagataattatattaagcgtgaaagaaaaataatctgtttcttcttaaacctgattaaggaaatcatggccttggctttagctaaagttgatgatgaaatgattaccaaggttaaagcacagggctatcagattgataagaagaatgagcgctcaatcaatatggcttttggcgaagttaggtatgtcagaagaagatatgtctgcccaggcaaacaagcaaggtatcccttggatgaattaatgggctttgacaaatacaagcgctacagtattttagcagtcaaaaacatcttagaagtaagcagcgttgccacttatcgcaatactgctctagcagtcaattgcctgtctggctttaatattagccatatgcaggtgggcaatttggtaaaaatggccgggaaaaatattaaagcgggccaagaagcagattcaagatatgatgccgcaggcactaagaaaaaggtcccagttttgtatcttgaaggcgatggcgtggtgatcaaaggcactaaaagccggttggaatttcatcgctatcaggtctgtgaaggcattgtcaatataagcaagaaacgcagaaagcgaatcaatgccaaggaatttgtttctttaagccgacttgatgcgctgaacgaagccaaggagtacctggccaatacttatgatctttctgatactgtaattcttagcaacgccgatggcggtgctggatatgccaaaacagacttcgatgacattgtagggctatgcaagcgtcatgagcatttcttggatgtctttcacctaaataagaaaatcaaagaaaggctatattttgcgcctgacctgcaaggcaagctgatttctgctttggaatacaaatacagctatgacaaagttaaaactatcctaaccactgcagaaagccgactaattgatgaattgaataccgagctcaatcatgattatctggggcgcctaaggaattatattgatcgtcattgggacgatattaagccgtttaagaaacgaaaactgactgtgactaaagccattggctgctgcgagagcaaccaccgcaagtatacctaccgtgttaaggggcaaggcaagaaatggtcaaaatctggagcagaaggcatgcttaggatcttaagctgcatcaagaatcgagagctggaattttggcttagcagcgagtttgaagattcagaaataactgtattgactgaacaggaattaaaagcagcggcccgtgacagcttaaagaagcgtcatgaagttcatttaggcatccagcatggcgcattaaccgcacaggtagctggcaatagttatttaagcaagctaagcagaaatttaagtcatataaatatttaagaaattaaggttagactaatggtttaaaggctaccgcaaaaacattgacacttacggacgaggatgttcaaatgaatgtcttcgccttttttggtacaatgaagacgccgctttagctcaataggtagagcaccgccgtggtaaggaggaggtccccagttcaaacctgggaagcggcttagttgttgtttttggcaagaaaggaaaaattttatgaagcatgaacttacaatgaatgaaattgctaaatttcaaaaagaatatgagcaaaaaccgcaaaatcgggttgcggaattggctgttgttaataatggtgtggctaaggctagtttggattcagaaaaggttaggaaattgaaccgcactttttcaattgaaatcccaactgataatgttactgatcaaaagcaatcgggtcgctgctggctatttgcggccttgaatacattgcgtcatggttttgctaagaagtataatgctaaaaactttactttttcacaaaattatttattcttctgggatcgaattgaacgagcaaatattttctttgataatattttgaataccgcagatcgtccacttagtgacagaacagtgcatacttatatgcagggacctgatactgatggtggccaatgggctatggctgtttctttgattaggaagtacggcttagtgccaacctatgctcaagatgaaagtttcactgccaacaatactgctttcttcaatcgtattttgaataataagttgcgagaagatggacttgtgttgcgtaagttagctcaagcaggtaaaaatgatgaaattgaagctaaacgtcaagaatttttgagtgaggtttaccgtatggcagtaattgctttcggtcaaccagtacaaaaatttgaccttgagtttaaggatgatgaaggtaagtatcattttgatggtgatcttactccacttgatttctttcacgactactttactgatgacttggatgactatattgttttgttcaatgcaccagatcatgaatttgataagctgtatgctttgccatttgaagacaatgtagagggcggaagtccagttcatttcttaaacactaaaattgaaaatcttaaagaagctgcgattaagcaacttgaagcaggcgaaactttttggtttggttgtgatgtaggtaaagatagcgatcgtcaaaagggaattttagctcataacctctatcaaactgatgctatttttaatattgaaactaagttaagcaaaaaagagagactggaaactggtgcttcgggttcaactcatgccatgacgatggttggtgtggatgttgttaatggaaagccacgtcaatggaaaattgaaaactcatggggaaacaaggtcggtgaaaaaggctactttgtgatggatgataactggtttgatgaatatctcttcaaagtagttgttaaaaaacaatatgtaccggaaaaactggttaagatttgggaaggcaaagcaacgccggtaaaagcatgggactcaatggcataatggaaattaaacaagttatcgattttactcaaacacacttaaagaatgaaaaaacgggtcatgatttttatcatggcgaacgtgtagctaatttggctagtcaaatgtatttagcagatcatgctgatgctcatgaagatagccgggtagttgctattattaaaacagcgggttatttgcatgacacgattgatgaaaaaatatgtgctgacccacaaaaggtaattgatgaaattaaagttttattgccgcaagtagggtttaatgaactggaggcatgggatattttattcaccattcaacacatgtcattttcagctaatattgagcatcactatcatttgcctttatctggacaatatgtgcaagatgctgatcgtctagaaagtttgggtgcgattggaattgcccgtgcctttacgtatggtggtaaacatggcaataagatttacgatccagagattaagccagccgttttaactagtcatgatcaatatcgtaaccatgtcgaaaccacaatcaaccacttttatgagaaactttttcatttagaagatttaatgaatactcctgctgccaaaaaagaagcggaaagacgaactgcatacatgcgcgactttgtacgtgaatttatgcaagaatggaatgtttagaataatttaattttgaataagccttgatacatcagcattgaggcttattttttaaataaattaaaaataatattaaaaaaaacttgcaaagcaaaaaatatttagctatacttataaacaacttaaagagttctattaattttctcataaacgaggggagcaataatatgaagtttaccaagttattcgctgcaggagcaaccgttttgattgctggctcaacattagcagcatgtggtagtaattctaattcgtcaagttcatcagctaagaaaacaattaattggatggattcggctgaaattccaacgatggacatttctaaggcaacagacgttaccagttttaaccaattgggtaacgttgaagaaggtttataccgtttaggtaagaattctaaagttgagaatgctttggcaacagataccaaggtgtcaaaagatggtaagacctggactttcaccttgcgtgattctaagtggtctaatggtgataagttaacggctaaagactttgtttactcatggcgcagaaccgttaatccaaagacggcttcacaatatgcttacctcttcgaaggaattcataatgccactcagatttctgcaggtaaggcaccagttaatagtttgggagtaaaggctgaaggtgataataagttagttgttaccttagacaaacgaattccatactttaaattattgatgggattcccattgttcttcccacaaaaccaaaaggtggttgaagctaatggctctaagtatggtacttcatctaagactacagccttcaacggaccttttgtacaaaagggctggactggttctaacctttcttggaagcttgtgaaaaacaagaattactgggacaagaagaatgttaagcttgatgctattaattacagcgtgcaaaagacaccatcaacagcttacaacttgtaccaatcaaataagcttgatgctactattttagattcacaacaaactaagaacttaaaacatcaaaagggttacactttgcgtgatactgcagcaaccttctatttgcaatttaaccaaaagaagaagattttccaaaatgctgacttgcgtagagcaatctcaatgtcaatcaatagaaaggcactgggaagtgctttaggtggtgctaataccccagcaaccagtttaacttcaaagggtgtagttaaccatgatggtaaggactggtcagaagttgttggtgataagaagaacgccgcatataacccaactgaagctaagaaactttacaagaaggctttgaaggaattagacgttaagaacgtttcatttacaatcctgtctgatgatactgattcaggtcaaaagacgactgaaacacttcaaagtcaattagaagaaaacttgaagggtatgaaggtttcagtagctaacgtaccattcaagactcgtttgaaccgttcaactagtggtaacttcgatgttgttgtttcaggttggtcagctgactttgccgatccaatttcattcgttgacttgtttactagcaagaatgcacaaaataacggtaagtggagtaactcccaatacgacaagttgatcgctgattctaagactacagcagatacaactaagcgttgggatgaccttgaaaaagcagaaaagatcttgcttagcgatgaaggaatcgccccactttactacaagactgaagcttggttagttcgtccagacattaagggcattgtctacaatggcgctggcttaaactacaacttcaagaatacttatgtagcaaattaattaaaaaatcaggaggacatagtaatgattattatttcagcaattattattttacaaacaagacataaaaataatctctcttcacttgtaattgcgtaataatagtctagctatgatttgatgaatagatagaaggagcaaccatgtgaaggttgctcctttttgtaataaaaaagaatgagggtcaaaatgaaaaagtggaaaaagtattttagtgcaagtttattaaccgtcgtatcagctgcaactttggcagcctgttcaaataaaagttcgtcatctggtaccaagcaaaccttgaattggatgactaaatcagaattacaaactttagatttgtccaaggtgactgatgcaactagtttagatcaaattaataattcgatggaaggactctatcgtttaggtaaaaattccaaggtggaaaatgctttggcaactaagactgaggtatcaaaggatggtaaagtgtggcattttactttgagaaagaatgccaaatggtctaatggtgatccagttactgctaaagatttcgtctattcatggcgtaggactgttgatccaaagactgcctcacaatatgcttatcttttctcaggagtaaagaatgcggatgatgtagtagcaggaaagaagaaggttgaaacactcggtgttaaagcagatgataaccaacatttaaccgttactttggatagaagaattccatactttaagctattgatgggcttcggggttttcttccctcaaaatgaacatgccgttgaaaagtatggcaaaaattatggtacctcatctaaaacaatggtttataacggaccatttgtatcaaaaggctggaccggttcaaacttgtcttggaagctagttaaaaataaagattactgggacaaaggcaaggtaaaactaagtaagattaattacagcgtgcaaaagacaccatcaactgactataacttgtatcaatctggaaaattagatgtagcattattggcaccacaagctacaaaacaattgaagaaccagagtggttatacaattagaccagcttcttcaacacaatatttacaattaaacgaaaagaacaagcttttccaaaatactgacttccgccgtgcactttcattatcggttaatcgtaaggcattagcttcagctgtaggtggtgctaacaagccagtcactaccttttcaccaaatagtatgactgaagtaaatggcaaagattatactgaattagtcaaaactgctgaaactgataagttaatgacatataaccctactttagctaaaagttattggaagaaagcacaaaaggctttaggacagagcaaagttaacttcactttgctaacctatgacgatgatgatgccaaaaaagcaggtgaatacttgcaaagtactattgagtcaaacttgaaaggcgttaatgtcagagtaaatagtttacctaaaaagactgccttagttcgtggtcaaaatggtaactttgatgctttactgatgggttggcaagctgactttactgatccaatctcattccttgacttgaacacctcaaatgcttcatacaactggggcaagtgggctaataaggaatatgataagtatgtagcagcttctaaaactactggaaacgaaaatactcgttttgaagacttagctaaggctgaacgtgtattgttaactgagcaaggtgtagtaccactttaccagccagcagaagcttggatggttcgtccaactgtcaagggcgttgtatataatggtgctggagctaactataacttcaaatatgcttatgttgaaaagtagactaaaatcctaaatatctaaataatagaacttataacaataaacaactcctctatgtaattaaaaagcagaccgaaaaaatcggtctgctttttgattttcgcttgaaaaaagcaagttaggctagtaaagtaaaactaataattttttgaatgagaaaaggagagcttaaatgtcaaattgggatacaaaattcgctaaaaaaggtttaacgtttgatgatgttttattaattccagcagaaagtcatgttttgccaaacgaagttgatttgagtacgactttggcggataacattaaattaaatattccattgatcagtgcagggatggatactgtaactgaaggtgcaatggcaattgcaatggctctccaaggtgggctaggcgttgtgcacaagaatatgtcaattcaagcgcaagctggtgaagtagccaacgtaaagagcgtagttgtgccaactagtgctgcaaaggccgcaactgatgatcaaaaccatctgctctgtgctgcagcagttggtgtaaccagtgatacttttgaaagagcagaagcattgcttgaagctggtgctgatgcgatcgttatcgatactgctcatggtcactcagctggggtattgcgcaagatcaaagaaatctgcgatcattttccagaagcaactttgattgctggtaatgttgcgactggggatgcaactagagcactgtttgatgctggtgttgatgtcgtcaaagttggtattggccctggatcaatttgtactactagagttgttgctggtgttggtgtgccacaaatcacggctatttatgatgctgctacagctgcacgtgaatatcacaagccaatcattgcagatggtggaattaaatattcaggtgatgttgttaaagctttagcagcgggtggcaatgctgtcatgcttggctcaatgctatcaggtactactgaagcacctggcgaaatttttgaagataatggcaagaagtataagcgctatcgcggaatggggtctgttggtgcgatggcccaagcacacggttcaagtgaccgttacttccaaggtggcgtaaacgaagctaataaacttgttccagaaggtgttgaagctcgagtagaatataagggcgatgtttctgatgtagtctttcaaattgatggtggtctccgttcaggtatgggatattgtggtgctgcaaatattccggaattaattgataaagctcaatttgttcaaatcactaatgcaggtttacgtgaatcacatccacatgatgttcaaatgaccaaagctgctccaaactatacaaaatagatataataaaagttaaaaataagagagaaagcaaaatttctctcttatttttttaattttttggacattttaactagatatatttatttcttttggtataattaaaacaacattaaaaagtaaatgaaagcataaaataaaatgagggagcaattaatatggctagatacctattaaaacgtatattttatatgatcctcactttgcttatcgtggctacggtaacttttttcttaatgaaattgatgccgggttcaccttatgctaatgaagcaaagatgacgctaactcagcggcaaattatggatcaacagtatggtttaaataaacctatctggcaacaatatttgatttatattgcggggatgcttcacggtgattttgggacatccttccaatatagtaaccaaccggtagcttcattaattggggcgcgtttgggtgcgtcagtacaattaggtttacaagcattaattttgggagttgtccttggtgtaatcgctggggcaattgctgctatgagacagggtacttgggttgactcaactgctactgtaatttctattttgggtaaatcagttcctaactttgttttagcagttttgcttcaatactacatcggtttaaagctaggttggttcccaattgctggttgggggcaattttctcaaacgattatgccaacgattgctttggcagttggaccatttgcggaaacagctcggtttatccgaaccagtatggttgataccttaagtagtgactatattgagttaggtaaggccaagggcttaagtagaatggaagtcattagaaaacatgcaatgcgtaattcaatgattccattagtaactctgattggtccttatgctgtagccttgatgactggttcaatggttattgaaaatatctttaacgttcctgggattggtgaacaatttgttaagtcgattttgactaacgactatccaacaatcatgggaattacgatggtttactgtattggattagtagtaattctgttgattactgatattgtttatggattaattgatccaagaattagattagatgaaagcgaggcctagaagacaatatgactgaagaaaaattaaaccttcctgcagatgcctttgaacccttatcaaaagatgaagcacaggataacgaaaacattgcaggtccatctttatcgtttgcacaaaatgtttggcttcgcttcaagcagagaaaagcagctattatttctgcaattattgttattttgatgattgtagtagcttttggttcaaccccattcatcaataaatctactttagttaaatcgcacccacaatatgccaatttacctgctaaagtgccaggaatgagcgcaattaacgggttgaacggtaagattaagcaaaatggcaagtgggttgatgcttatgcccagaatggcgtgcctaaagataagtattttatcgcaggtacagattatttaggcagatctttgggacaaagaattatctatggtacaaagatttcattgatcgtcgctttagttgcagctttctttgatttaactatcggagtcgcgtacggaatagtgtccggctggaaaggcgggggagtcgataacgtaatgcagcgaattatcgaaattatctcttccgtgcctaatttaatcattgtagttttgatgttggtggtattaaaaccaggtattaagtcaattatcttggcaattgctatttcaagttggacgacaatggcacggcaagttagagcagaaactctgagtttgaaaaatgaagaatatgttttggcagctagatcattaggtgaatcaccttggaaaattgcttggaaacacttagtgccaaacctttcaagcatcatcattattcaaacgatgtatactattccaactgccatcttcttcgaagccttcttaagtttcatcggaatcggtatttcagccccagaaacttcactaggtgtacttttgaacgaaggacaaaagaattttcaattcttgccatatcagatgtggtatccagcaatcgtattgtgtgtgttgatgattgcctttaacttattaggtgatggtttgcgtgatgccttcgatccacggggacaaagatagaaaggattaacctaaatgccagaagaaagagttttagatgttaaaaatttaaaaattgatttccacacttatgctggtgaggttaaagctattcgtaacgtttcctttcacctaaataagggagagacgctcgcaattgtaggagaatcaggttcaggtaagtcggttactaccagaagtattatcggtctgttagcacgaaatgctcagattgaagacggtgagattgatttccacggcaaaaatttgctagagttatctgaaaaagaaatgcaaaaaattcgtggtaacgaaatttcgatgattttccaggatccaatgacttcgcttgacccaactatgaagattgggcagcaaattgcggagccattaatcaaacataagggtgcctctaagaaagaagcttgggctaaagccttggaaatgatgaaggccgtgggaatcccaaatgcagaagaacgaattaatcaatatcctcaccagttttcaggtgggatgagacaaagaatcgtaattgcgattgctttaatttgtgagccagagattttgctggctgatgaaccaactacagctctagacgtgactgtccaagctgaaatcttggacttgatgaaagacttgcaaaagcgggttaagacctcaattattttcattacgcacgacttgggcgtggtggccggtatggcagatagagtagctgtaatgtacgctggtgaattcttagaattcggtggtgttgatgaaattttttatgatccacagcatccatatacttggggcttaatcaattcaatgcctactttaaacagtgatactttggagtcgattccaggtacgcctcctaacttgcttgatccgcccaagggtgatccttttgcaccaagaaataagtatgccatgaagattgatgtggaaagaaagccacgatttttcaaggtaactgatactcactatgctgcaacctggcttttagcaccaggtgcacctaaagtggaaccaccagctgaaattacacgtcgctggaaaaaatataacttgatgaaacaagaagataaactgccagaggttaactagtcgcggtaaaggagatttttatgccagaaaaaaagaaaattttggaagtaaaacatctaaaacaatactttaaaaatggtcgtaatgtcaccaaggctgttgacgatgtaagctttaatatctatgaaggtgaaactttcggcttggtaggtgaatctggttctggtaagacaactactgggcgctcaattttgcaattgtataagccaactagtggcgaagtgatttttgaaggcaaaaatgtagcagatttaaaaagtcgtgcagacaaactagcttttacacgggatgcacaaatgatctttcaagatccttatgcttcacttaatcctagaatgactgttgaggacattattgctgaaggattagatattcaccatttggttaaaaataaagatgaacgaactgagagagtagaggaattattggaaactgttggcttaaatgcaagtcatgctagccgttttccacatgaattctcaggtggtcagcgtcaaagaatcgggattgctcgcgccttagccgtagagcccaaatttattgttgcagacgaacctatttcagctctagacgtatcaattcaagctcaagtagttaacttgatgattgaattacagaaaaagcgtggtttaacttacttgttcattgcccacgatttatcaatggttaagtttatttctgaccgaattggtgtaatgcactacggtaaactactggaagtaggtccagccgatgacgtctatgatcgaccacttcatgattacacgaagagtttgatttctgcagtgccaattcctgatccagaagttgagcggagccggacaaggattccttatgacgctcaaaaagaagaaatggacggaaagcaacgctcaatgcatgaaattcgtccaggacacttcgtacgctgctctgacgatgaagtcaagcattacgaagaagtagcggcaagctacgaaaattagataccaaatctaatgcaactctctctatattaatattatatttatgctaaaaaggcgatccgatatggatcgcctttttatatgatcattgctcgttaagctaatgaatcccatgctggtaggtcagtgattggaccttcagcgagcttcttttggttttcagttaagtacttcttgtggactacaacttcgtaaacatagtccttaaaccattcattattcatgacgtagaagcctttaacaccagatttatcgccccatgagttctcaactttccattgacgaacttcgccgttgtcttcatcaacaccaactaaagtcatggcatgtgacacttgaccgacgccggtctttaatctgtctgctttagacattttaaggtcaacgccgaataagtcatctaacttgtacaaattagtgtcaaggtaaccagttttacggtccatttgacgtaaaacatcgttaccaaaccaaacagcttcgccgtcttttaattgagcgatagcagcgctggacaagtattccattggtacattcaaaagcttgattctcagtgagccttcaatgttgtcttcagctggtagaccataaagcttgttatagtcatggtctggagcattggttaaaacaacatagtcatcaaaatcaacgtcgcccatgtacttgtgtaaaaactcaagtggagttaggttcttttctaaatgatatttcttgtcgtcatcacgatattcaagatcgaaagtcttaggtggttcacctactgcgatagcagtcatttggtaaacttcgcttaaaaatttttcgcgaacctttttaatttcatcatctttgccgtattgcttcaagtggcgcaatactaaagcatccttctttaacttatcgcccaaagcagtagcaaaaccagttgtatcattggtgttaaaagtttctggcattgcatatgaaggaacaacaccatatttttcaactaaagcggcagccatttggaattgtccaccatcactaccagcaaagtctaagtcagccttaacttgacgtgaatcaagtggcatgtcagcactgtctaagattctgttgtagaacatgttagcacgttcgatcttatcccagaagaagttgtaagcttgtgagaaggtgaagtccttagccttatatttcttaccaaaagcgtggcgcaaaacgttcaaagtcgcaaacagccagcaacgaccagaatgtttttggttagtgacattatttgtatcaagttcagttgaaaagacgcgggttaattgtccttgaacacgatcattataagatgcttcaagtacaccactgcgttgagctgcacgagcaacgactttattttcaggttttttattaaattcggcagagaacttttctagttcctgcacagttaattcatgagccataaaaaatctccttttcattttataatttttttctcaatttaattctattttaaagcaaaacaaaagcgggttcaatcagaactcgcttgagagaattattaatccgtcaacttattagatttcttgcctatatctaataaattaatcaatttggatagaattgccatcattgccagcagtttcctttggcaaagtgatggtcaatacaccattatcatactttgcatgaatctcacttgcaactacatttggtaatctatagcttctagaaatactgccctcacttctttccttatgaatgatatttctatttttatcgctagtgtccttaaatgattttcttgtgccgctgacatttaacgtaccgtcattatagttaacgttgatatcctgcttatccatgccaggcatgtcaatcttaactagatagtccttatcagtttctgcaacatcagattgcataatgttttcaatttcattatcgtcaaagaagtttcttggaaaaccaaaccaatcattcattgcatccatcatgtcgttgcgccgattcatcatattgtttgccataaataaaacttcctttcatttttgtatttgcttaattagaatataaggaaaagatcaactcatttcttgatctcttttctccttacactgtttattgtagtcgctttttatagaaatgacacaaattagcactcaaaaatttatagtgctaattttagactgataacgctgctacaataacattctgagattgtagataattattacgtatagaaaaataaagaaagtttgtgaaatagaaatggtatattttcagaaaatgacaccagaaggctatcaacaaattgaggatgaaattgctcgattaaaaaaagatcggccacgtagaattaaaattttgcaggctgcacgagctttaggtgatctttcggaaaatactgaatatactgaagcaaaacgtgatctaggtcacttacaaagtcgtctgcgttacctaggcaaacaattaaagtatgccgaaattgttaaagctgaagatgatggtaaggttgatctaggaaagaccgttgtgcttaagtttgatgacgatgatgaaacagaagaatacaaagtagttgggcgaatggaagcggatcttgctgctggcaaggtttcttttgattctccattgggtcaagcaatcatgaaaaaggaggctggtacaacagcaacggtggctgcaccagcaggtgaatatcaagtaacgattgtggaagttaaataagttgagaactataataaactgtctttttctggtataatatgggttttgtgggatacaattcagagtaggagtgaagaatttgaatacgccacaatcaagagagggtaatgtgatccgctatgccgtttatttagctggctatgtcgctgtgtttgcagtagtaaagctagttactagaaaatctccggctcatatttgggatttgattttattcggcttagttgcagccatgattctgttgttttatgtttatcgtttcaatcgagagcaacgcttttttgcccgtgattttaaacttccatggttgggcagtttgtcaactgttgttctattaacattagtgattacagttacacagatttcgatttcatacttacaatcatatggcaggattagtcattatgatttccaattgatatatgccaaaagtgaatcagttaacatgttttggtttttaatcgttgtccaaggaattgtattaccaatcctacaagaatttttggcgactggctttttgttcaattatgcttttcggcgaaatactaagcaagttgcaattatggggatcattgtttcaggtctgatttatagcttactgagctttcaaaattcagtagtactgtttattattgatgcaatttatggcatggtgtttgcttggagctatatgtacacacaaacattattgatgccaatttacttagctgtagttagtggcgtacttacagtgattatgatttaaaaacaaaaggatgagaaaaattctcatccttatttttgtataaaaaaagcggatagcgtgaatcgaacccgcatctacagcttgggaagctgtcgttctaccatttaactatacccgcaatatgtttttattttagcattttttctatttgaagatcaacacttttacgatcaattaagctggtaaaattttgaaaaagccagcggcgtagttcgttgggcataacaactagaggcattctattatggattggcgccatatctttgttaggcgcggtagtaaccattgaaaaataatcctgatcataaatacctgcaattaaggtaagtggttgattagtgcggaaggcgtagctatcatggtatttacgaccgttttcagcaatatgggtagttttagcatattcaaagaatttttcggttaagattaagcaacgttgcttggcaaaggatttgtcccacattgaaggcgctgaatcataaaatcgctcaattctagcgttaaataatggcttttttggatcaacgggacttggatagccccattttttgttgtttaattgcaattgaccattttgataaagcaaaacaggtgctacttggttaggaaaaatatcttgtgcttgaatgtcaaaatttggtgtaactaagggcaggtcaagatcgcttttgagatattgttgaatttgttttaaattaggtaaacgaaactggttgcacatacgcatttcctttctttagggctagtttaatcatagcctattttttgttaaaattaggtaattaaacaattaatattaataaaaaaataaacttaaaaattagaaaagagcaaaaagatggcgaaagaaattttattaactggtgaccgtcctactggtaagctgcacattggtcactatatcggttcattaaagaatagagtaaaattacaaaattcaggtaaatatgatccatatattatgattgcggatacacaggctttgaccgacaatgctcgtaatccggaaaaaattcgcaatagtttgatccaagtagctttagattacttagctgttggtattgatccagctaaatcaactatttatgttcaatcacaaattcctgctctatttgaattgactgcttactacatggatttagtaactgtggctcggcttgaaagaaatccaactgttaagacagaaattaagcaaaaagatttcaaagactctattccaattggctttttaaactatccagtttctcaagctgctgatatcaccgcttttaaagcaaacgttattcctgttggagatgaccaggaaccaatgttggaacaaacacgtgaaatcgttaggacttttaaccgtgtttataattgtgatgttttggttgaacctaaaggttatttcccacctaaaggtcaaggacgtttgccaggacttgatggtaatgcgaagatgtcgaagtcacttggcaatgcgatttatcttgctgatgatgcaaagacagttcaaaagaaagttatgtcaatgtacacggatcctaaccatattcacgttgaagaccctggtaaggttgaaggtaacactgtctttacatatcttgatgtcttcgatccagataaggacaaggtggcagaacttaaggcagaataccaaaagggtggcttaggtgacgttaagattaagcgttacttaaacaaggtccttgaagcagagcttgcaccaattcgtgaacgtcgcgaaaagtttgctcaagatgaagatgcggtttatgaaatgcttctggaaggttcaaaaaaggctaataaagtggctaatgcaacacttgaacaagtccgtgacgcaattggtttgaactatttcaagaatagataaggctgaggtaaagttatgcacgatcgaattccttggaaacaatattttatgatgcaggcgctagtaattgcgcaacgctctacttgtaatcgcgcattagttggtagcgtcttagtaaaaaataatcggattattggcactggttataatggttccgtttcaggacaaccgcattgtgacgatgtgggtcatcaaatggttgatggtcactgcgttagaactattcattcagaaatgaatgcgatcattcagtgtgctaagtttggtgtttctacagaaaatactgagatttatgtgacacattttccttgctataattgctgcaaatccttgttgcaggcaggcgtgaaaaaaattaactattattttgactatcgcgataatccattggcgatgcaactacttcatgatagcggggtgccttatgaacagattaagattaatcgcaaatacgtggaaagcttggcccataaacttgaagaagacgagaattaatttaatttggttaatgggactagtaactgtatttttaataacgacaggatttgtccagccaaatattgaagatcatgctcatattttagataaagaaactcgcactttgattacggaaaaaaataatcgctattttcagactaaagaacaaccgcaaattgtcgttataacggttaaaaggctgaataagttaacacctaagatgctagatcattctaagcgaacggtctttattgtggtaggacagaaaggtaaaaagcgtaatgtgcaaatttattcaactaaagatttgcatagtgccttcaccgaggtcgctcggggcaatatcttgcgtgctgaagtagataaattgcgtagtcaaaataatgcaacttttaacaagggaattcgcttcgtctttcgggcatgtgcgactagagttgatcaacaatatcaatatgcacttgataaatatgatttgacgcaagcagaacaaaataaagtcgcgcgtccacatagtgtagctttaccaatcgcactggcactggcatttttaattacgggaattacttatttcttgcgtagatttagtcatcgtgatccaatttctaagaaatagtcggcttgacttatttgcattttgtccttacactttttatagacataattagcgaaaaactgttaggtgaaactcctacgtgaacacacgctatcgcccagaaacatccagagatgccaacgggttaaataggtgtcgtcgacttaaggcgagatccagatagctagcatgtgcttacgtcacgtagtgttaaaactgaacgacgagtatgacagagccttgtttggcaaaagtcacctgcagagttacaggtggcttttttgttttgcttgtcccaattaaagaagggagcaaataatgttaaaagcagctagcaagaagcgatcgaatatagacattcaaaggattcaacggattgcgcgtgagtcacgtagcgagacgctggcgcgtttacaggcgagtgctgaagggctttcgactaataaggctgaagaaaacagaagagaatatggcaaaaacgaaatcattactaatagcaattcctctaaatggcgcttattatgggaatcaatcgctacgccatttacgttggttttattagtattaactttattaaccctgtttactagctatattttggtgccacaaggagataatgacttaattactacgatagtgatgatcgtgatgttgattatctcggttctcgtcaattttatccaaaaaatcagaattgctaaggtaactgatcaattactcaatatggtatcagttacaacgaatatccggcgtgatggcaaaaatgtggaattgccaacagatgaagtagtggttggtgatgtaattaacttgtcggctggtgatatgattccagcggatatgaagttgttaactagcaaagatcttttttgctcatcaagctatttagatggggatcctgagccggcagaaaagatggctaatgtagtaattaagccgagtatggctaatgattatttgaactaccctaatattctatatgagggaacaactattgtttcaggctctggcaccgggattgtttttgcaattggcaatcacactgtttttggcaaagcagttcaggctatttcccgtaaaaaagtaaaaactaccctgtttgaccgggaaatgaagcaattagctaaaatattgattatcgcgacagcaattgtgattccgcttttgtttgtgattaatggcctgactaaggggaattgggggggaaagcttaattttcgctttgacagcggcagttggcttaacaccagaagtgttgccgattattgttaattccaatttaacacggggcgcacgggaaatatcccaaaatggtgctgtcgttaagcaaatgaatgctattcaaaatttgggctcaactgatgtgttctgtatcgataaaaccgggactttgacacaaaatcaagtggttttagagcgtcactatgatttagatatgcaagaaaccccacagattttgaagttttcatatttgaatgcatattatcaaactggggtaaaagatttaatcgataaggcggtaattgatgccgcgggcgatgaactagatgtaaacgaaattcagcgtgattacaataaaattgacgaaattccctttgactacactcgaaaaagaatgagcgtggtagtggtagataacgatgaacaccacgggcagcacttattagtaactaaaggtgccgctgaagggatgctggcaatttctaataaggttgaacttaatggcaaggttgaggatttaactactgcctggcgagaaaagatcttaaatcagattaatgaattaaacgatgacggtttacgggtacttttagtaggttataaattaaatcctgccccagtaggtgagttctctgctaaagatgaacatgatttaaccattattggctatttggcttatcttgatccgccaaaagaaacaactaaagaagcgctggaagatcttaaaaaagattatgttgatgtcaagatttttactggtgataacgaagcagttactcgtgctattgctttgcaggtgggattaaacgttgatactgtttatgacggcacccagatcgaagcggttagcccggaagagttgcgtgaaattgttgaaaaatgcgatatatttgtgcgaataaccccggaattaagagtaaaaattattaatgcactcaaagcaaacggtcatacagtcggttatatggggaatggcaataaagacgctttagcaatgaaggtagctgatgtgaccgtaacttcgaatacgtcagttgatattatcaaagagtcagccgatattatttttgagcaaaaagatttgcagctgttagaagaaatgattctaatgggccgaaaagtcttttcaaatacaatgaaatatattaagaccttcttggtaactaacgctggtagtgtaattgcgatggttgtttcatcgctgctcttgccatttttgcctcttttgccattgcaagttttaattttaaatttgctgtttagcataagttgtctggttattccctttgatagtgtttctaaaaactatgtcaaaaagccacaaaaatggtcgattaagagatggccgaagtttgtacttaattttggtccgattctagcaattattgattttatcgcaatgggcttgatgttttatgtgatttgtccatatttagtagggtctaattatcatcattgggtctttatgacactattttattcggggatttttgtggaatcgctttggacaagaattatggtgattcacactttgcgtgatgaacgttttccattctttaagcaacatgccacgccagtggtgttcttggtgaccattggtatggcaattattggtacaatgttgccttcatcaagtatcgcgccaagtttgggcctagctcaattgccgtttggttattggggcatagtcttcttgctagaagtaatctacattttactgacgactttggttaagcacttatatttaaaaaaagaaaaattctgatttgaattaaaaggaattgctggttttagcccaattcctttttttgcatgttaaaataaaatagatattttagacgattaaaggagtttgattaatcaatggctgataaagatactttttatattacaaccccaatttactatccatctggtcgcttaacgatcggtaatgcttatactactattgcagctgatacaatggctcgttacaagcgcagtcaaggctacgatactttctttttaactggtactgatgaacacggcttaaagattgaacaaaaagctgaagcacaaggaattaagccacaagagttcgtcgacaagatggcggcttcttacaagaaattatggaagagtctcaatatttcttacgataagtttattagaacaactgacaaagagcacgtagctgccgtacaaaagatttttgaaaaattattagcaaaaggtgacatctacctaggcgaatatactggctggtactcagttgaagatgaagaatactttactgaatcacagcttgctgaagtttacaaagatgatgatggtaatgtaatcggcggtaaggctccaagtggtcatgaagtacgtttggttaaggaaccatcctacttcttcaagatgagcaagtatgctgaccgtttggtggaatactacaaggaacatcctgaatttattttgcctcattcacgtgaaaaggaaatgcttaataacttcattaagccaggtttggaagatttatcagttacccggactactgttaactggggaattcctgttctaagtgatcctaaacacgtggtttacgtttggatcgatgcactttcaaactatattaccgctttgggctatggttcagacgatgattcattgtttaagaaatattggcctgcagacgttcacttggtaggtaaggaaattgttcgtttccacactatttattggccaattatgttaatggctcttgatttgccacttcctaagcacattatcggccatggttgggtattgatgaaaaatggcaagatgtctaagtcaaagggaaatgccgtttatccagaatcattgactagtcgttatggtgttgatccacttcgctattacttgatgcgtgctcttccatttggcgatgacggtatttttacaccagaagactttgttgaaagaattaattatgacttggccaacgatttgggtaacttacttaacagaaccgtgtcaatgattaatcaatatcaagctggtcatgttgatgcagttcccgttgctcaagctgaatttggcaaagacttgcaagatacagctgctagtgtcattaatgattatcgcgaaaatatggattcacttcacttttcaaaggcattagacaatatttggaagttggtttctcgtgctaacaagtatattgatgaaactactccatgggctttgaacaaagaaggtaaaaaggaagaacttagcaaggtcatgagcaatttggctgaaagcttgcgtttaattgctattatgattgaaccagtaatgaccgaaactgcaccaattatgttcaagcaacttggtttaaattgggacaatgaagacgctaagcatttggcctttggtgactttgattgggatgttaaagtaattgaaaaaccacaaccaattttcccaagacttaagatggacgaagaagttaagtacatcaaggatgaaatggctaaagctaagccaaagaagaccactagaagtgaacaaaagaagggtgacgaaatcaccattgacgattttgacaaggttaagatccaagtaggccaaattttgtcagttgaaccagttaaaggctcaagcaagttgctcatgttcaagctggactttggtaatggcaaggaaacccaaattttgagtggtatccgcaagttttatccagatgcaagtgagctattagacaaaaaggttttagctgttactaacttaaagccacgtaagatgctgggtcaccttagtgaagggatgctcttatcaagtgaaaagcatggcaaaattaagttagctcttgttggtgatgaacatgcagttggggctgaactcggctaatggagatcattgataatcatactcatttgaatgacgagccgtttcgcggcaaggaacaatattatttagaacgagcaaaagcacttgatgtaaccaaggttatttgtgcggggcaagatcctgactttaatcaaagagcggttgacttagcacaaaggtttgataatgtctatgcgatggtcggttactgtcccgatgtggctaaagactatgatcaacaggctgaagataaactaattgaacaattgaagcagcctaaggtagttgcaatgggcgaaatcgggctagattattattgggatgaatcgccgcgcgacgtacagcgtaatgtttttgcgcggcaaattgaagtagcacatgacttgaagatgccagttgatatccatactagggatgcatttggagattgttataacatcttgaaaaatagcaatctggaatatggtgctgttttgcatagttttaacggtggtgttgactggttaaataagtttttggatttgaatgtttacttttcatattcaggtgttgtttctttcactaaggctacggaagtacacgagagtgcaaaagctgcgccacttgaccgaattttagttgaaaccgacgcgccatatttaacgcctaagccatatcgtggtcatcaaaatgaaactggctacgtacgttatgtggcagaagcaattgctaagttgaaggatattccactagagaaagtggcggatgctacttataagaacacagtgagagtttatgggcttaaataaaaagaattttgatgcggtaatcgttgttgaggggaaagacgataccatccgtttaaaacaatttttcccaggaatcgagacaattgagactaatggatcagccgtttcagatgaagtattgaagcaaatccaaaaattaagtgagagtcggcaaattattgtctttactgatcctgactttaatggcgaaagaatccggcgcattgtaactaaagctgttcctgatgcaaagcaagcttttattacccgtaaggaaggcgaacctcataaaaaggggagtctaggtgtagaacatgcttcaaaagaagcacttgagcatgcactaagtgatttgcatgaggttgaaccgcaaaaaagtgatttaactccagcaatttatcggcaattaggtttagctggtggtagcggctcacgaaaattacgtgaacaagtaggcattaaattacgagttggctatggcaattccaagcagttttataatcgcttgcatacttttggcgtttcattagctgaattaaaggcagctgtcaaggaggtagaaaatgacaaataatattccaattggctctccagttagaacacaagcaattgttaaccgttactttgtcaaagctaaaaagaacttagggcaaaatttcttagttgatcagactgctattttaggtattgttgaagctgctgggataaaaaaagatgatcaagtcattgaaattggaccaggtattggctctttgactgagcaactactgttggcaggtgctaaagtttttgcttatgaagttgatgatagcttacctacgattttacagaatgaactgcctaagaaaattgatgatcagcctttggctagtcgctttaagctgatcttgaaagatgtattaaaagcggactttaaggtagatattagtgacttctttgattttactaagccaattaaagttgtagctaacttgccgtattacatcactacgccaatcatttttgccttagctgaatcagatttgcactttacttcattgaccttaatgatgcaaaaagaagtagcagaacgattagaagcccaaccaggcagcaaggaatacggtccgttgactatttccgttcagaccgaaatgaatgttaaacttgctttgcaggtgagtcataattcctttatgccgcgaccaaaagtagactcgagcgtagttgtcttaacgccactgaaggaaaagccagcaattgaaaatcgtaagcattttatttgggtagtgaaaatgtgtttttcacaaagaagaaagacactcaataataatttaaaagctttgttgcctgataaaactaagcgtgatgaattatttgcggaattaggggtaaatccaagaattcgccctgaagaattaacaattaaacaatttattaaaattgctagctttattcctgcaagatgatgtataatattgaatttattatatatttgtgataaaatgttgctaaaggagctgttgtttagtgccaacatcaattatcacaattaaacataagttggattctcacttaggtgatactttaacagtagtagctcaagcgggtcgtaagaaagttactaagagacggggaattctaagagagactttccctgcagtgtttgtggttgatttagaccaacatcaaaataattttaaacatgtttcttacagttataccgatttactaactaagaatattgcattagagtttgatgatgaagctgaagaggctgaagcttaaacacaatttttgaaattgtcactagcatttatttaaaatgttagtgcttttttttgccctttagagtatattaattaagtataaaccaaacattagaaaggagatttcatgaaacgttcagaaagattggtggacatgaccaaatatttaatggagcgtccccatactttaattgcactaccattctttgctaagcgttacggcgctgctaagtcatctatttcagaagatttagctattttgaagcacactcttgccagcaatcaagatggtattttggagactgtagccggtgcagctggtggcgtgcgctatattccatttttaggtaaaaaacacgcggaagcatatttgtcagatttatcaactaggattgaggatccaagtagaattttagccggtggttttgtgtatctgtcagatattttaggcaatacgcaagatttacgtaaaattggtgaattagtagctactcattatgcttatgaagaaatcgatgctgtcatgacagttgaaacaaaagggattgctttagccaaagcagttgctcgttttttagatgtaccatttgttacagctagaaagcgatcaaaggtaacagaaggtgctactgtttctgttaactatatttcttcatcgttgtctcgagtatcgaagatggaattaccgactcgtgctcttaaaaaagaagctaaagttttaattgtcgatgattttatgaagggtggcggtaccctaaccggaatggaagaattagttaaggaattcgatggtactattgccggcgtttgtgtactctgtgaagccgattttgacaaagaaaagctgattaagaactatctttcattagtaaaaattagtgaaattgatactgcccaaaagctgattgtagcagaacctggtaacttcttaactgaaactgattttgaccgtttctaaaatggtatactagaatcaagttttgattattaagaggttaatattaatggaaaaatatgtagttgttcttgccgcaggtaagggcacacgaatgaagtcaaagttgtacaaggttttacacaaagtttgtggtaaaaccatggttgagcatgttgttgatgcagctcaaggcgttaatcctgcagaaatcgttacaatcgttggtacaggtgctggcgatgtagaaaaagtactggcagacaagtctaagtttgctttccaagaaaagcaattaggtactggtgacgccgtaatgactgcgcgtgaagaattgggtgacaatgatggtgctactttagtagttactggtgatacaccacttttcacaactgatacatttaatgaactattcaagtatcatgcagaaaaaggcaatgctgcaactgtattgaccgcggaagctccaaatccatttggctatggtcgaattattcgtgatgatcaaggcaatgttttacgaattgtagaacaaaaagatggtaaaccagaagaattaaaagtaaaagaaatcaatactggtgtattttgctttgacaataaaaaattatttgaagcattgaagcacgttaataatgacaatgctcaaggtgaatattacttaactgatgttttagaaatcttgcgcaatagtggtgaacgcgttggtgcttacaagatgcctgactttagtgaaagccttggcgttaatgaccgtattgcattagctcaagctactaagactatgcaaagaagaattaatgaacagcatatgcgtgatggtgtttcatttatcgaccctgatactgcttatattgatgcagatgttaagattggcaacgacactgtaattgaaggtaatgttgtgattaaaggaaacaccgaaattggtagtgattgctacattactagtggttcaagaatcgttgattctaagattggtaataatgtcactgttacttcttcaactgttgaagaagctgaaatggacgataatactgacatcggtcctaattcacaccttcgtcctaaggcaattattcgcaaaggtgcacatattggtaactttgtggaaattaagaaggctgagattggtgaaaatactaaagtaggtcacttgacttatgttggagacgctaccttaggtaaagacattaacattggctgtggtacgatcttctctaattacgatggtgtaaagaagttccatactaatgttggtgatcatgcctttattggtgctggctcaacattgattgctccaattaatgttgcagatcacgcctttattgcagctgataccactgttactaaggacgttaataaatatgacatggcaattggccgtggccgtcaagttaataagccagattattggcataagcttcctctttctcaagataaagaatgggattaagaataaggcactagtgtatcaagctagtgcttttttgttaagaattgctaaatacttattgcaaaataataattgagacctacaataaggtgtactaataataatttttacatgagtcatgtggtaataagtcaaatgaaaggcgatgatatttgttctttttgatcataaatttgagtatatgaaactaagccttggtaaaggttgatttttttaatgttaaacttttgtttacttttaaatttagaccaatttttgaaattaagacctcggtgtcctgtacagtttgtcatctttgagcaatttaaagataactcgtactaattttcttgcagttaatgtgcaagcacgtttatgcggcgagtagacagcttcatcatacttcttttggtaatattttttgaaaacaggatcatgtaatcttgctagattggcagcttcaatcaagtaatatcttagatatctgtttccagtcctggccattggagtatgttcgttgctgtgatctcccgattgatattgattccaggttaggccggcatacttagccagctgttcttctttatcaaagcgatcgatacttccgatctcagcgataataccagctgtataggttttgccaataccgggaattgattccagaattttgctttctggtaatgcatcaacgatacgatcaattgctttttctagatctttaatagattcattaaagctttgaatcatgttgtaatgaacagaaagcactgcatcaattgaatcagtcattactttgcctaagcgatatgaacctctaacagctttcttaattgctttagccaaggtatctggatcggaaaagcgtcctctgcctttaacctgtaagtaagaaattaagtcttcggtaggcatatccgcgatctcatccagagttttactatcggttacaatagacatcattgtagcaccgaaaagaggagtattaatcttatctttatcgacagtgattagtttattaacccgataatataaagcttcaatgaagtgctgtttggtacgagtcagttcttgaactaattcatatctggtacgcgttaaacgctctaaagcaagatagttgtcttgtctggcaatgcttactcgataatgtccaaagcttagatacaaagcaatgtaataagcatcgagaggatcagttttactttcttcaaagactttatgaaacctgctggtttctttggggttaattacatcagtctctacattgagcttttgtaaatcttcgtcattttggaaaaagtaagcaggatgaaaactgtaaatagatgtagcttccatgccaataatgatttgatcatagtgtttattttgagctagatctaaaatttgttttttcagttcactagcaccataaagatcattgacaaagctatcgttaattaagcgtttgttttgatcttctgaatcaagtgcaacgacctgtaaatctttagaactaacatcaataccgacaaataatttcattggaaatggcctcctttctttcaaatttctgatcatagattttgatcttcacatgttaacccctaattacagttcttaagttcaatctcgccagtataagtattcactggttgcttctttgaaagctgcacctaatcccaattgctcaaggactagcaaaaagaagcaatcaatacagcatgtgagttagagcataaaggaactgtctgggtggcagacttataaagcagacaaaactgcaggaggtgataacctagaccagttgaccaaagccaatgacaattagaggctaacatgtgaagatcaaaaagcaaatactaatttgattaattatcacaatatgactaattacaatttatataatacgaggtaggtaatacaatgaaattaagtcataagttagttatggtttcagcagctgttttgatgggtgttagcccagtattaggcatggcagaaaatactgtatctgttcaagctgctactaagagtactaatggcgtacataatacttacggtaaaaacagcaaagtcaaagtaactaagactatgaagtttgtcgaccgtaatggtaagaaaacttctaagactgctcctaagggtggtagctacactatttggaacgtcaagaatatcgacggtcaagtttactacagtattcaaactgatttgaagtactggattcctgcaactgcaactgaaggtacagtaacttataagtcaggcaatactacttatactttaaagagtgatggcaagaaggtaacaacttctacttcaactaagaaggctgttaagaagactaattcaaataaaaacactaaaaaagtagttaaagaatcaactaaaaaaactgccactaagactactaaaaaaagcaactcagaaaagactactaagaaaacttcatcaaagaagacgccagtggctaaggcagttaagataactactaagaataaggcttacgtttacgacaagaatggtaagcgtgtaaaaaactatttaggcactagttacattggtaaaaagatcactgttaaaggtttaggtactaagaccattaatggtgttaaatattatgctttgcaaccaaatcattattacattaaagcttcagatgtaactgttaagtaataattgataggaaaaagacactttttcgttatgaaaagatgtctttttcgtttctaaattggcaaaaaaatattttagatctacaatatataaatgaactttaagtttagtaagaatgaggtatttatcgatgaaattaagtcataaattagttatggtctcagcagctgcattgatgagtgttgctccacttttggatactgcagaaaacgtcaacactgttcaagctgctcctaagaagactacttcaaagaaggcagcaaacaacaagatcactttggtacgtaatgcttatgtgtacgataagaatggtaagcgtcttgataagtacatgggcagtgcaaaaaacactactattgctaaaggcgtaactgttacttcaactggcactaagactatcaatggtgtaaagtactacgatcttggtggtggtgcttatatcaaggctgttaacgtagatggtaaagctgcgtcatcaacttcatcactgtcaaagggtactaaggctaagtttgtttctaactcatacatttatgacaagaacggtaaacgtatcagcaagtaccaaggcaaatctaagtttgttaagggcgattcagtcactacttacggtattcaaaccattaacggtaagaagtattaccaacttgacaagaagggtactgcttttgtacgaactgttaacattgatggtaaaaccacttcaaaccaagaatcatctgtttcaaatgatgcagaatcaactaaaaaatatgactactcattaaagaagaatgcttatatttatgataagaatggtaagcgcatcaacaagtaccaaggcaagtctaagcttttaaagggtgccgcaattgatgtttatggcattgaaaccattaagggtaaggattactaccaacttgacaagaaaggcactgcttttgttaaggcaagtaatgtaactagaaccgttaaggcaacttcaattaccatgaagaagaatgcttatatctacaatggtaacggtgacaccaagaagaagacagttaagaagggtaagactgttaaagctactgaagcaagatacattggtactaagctttactacaagattagtgataatcaattcgttaaggctgctaatgtaggtaaaatttcaggcccagaactagaaccagttaacgaaccagatggtgctgctactgttgatactggtgataatactgtagatccaaacgtaaccaaggtaactacgattaatgttgctccactttacaacattaagggacaaccagataacgttagagcatttggcgcaggtcaaagtcaacaagtttcagaattgagatatattgcaacttctgcaactgctaccccagaattattctacaaattatcaagcggtagaggctatttaaagaagtcagacgttgctgtaagtggtaagattttaactcctgttaacactccagaacaagctagagcagacgttacagttgctacagcagctgataagactaagttgcttcaagacattaacgaagcaactagtgttaagaactcagaagcttacaagtttgcttcaagtgatgccaaggttgcatatgatagggcaattacaaatggtactgctgttaacaacgatgctgcagctactattgctcaagttaacgaagcagatgctgctattgttagtgcaaaggctaaacttgatggcaagagagttgctgttgctaacatgaccaatttaacttcagatgaaatggcagctattattaaggttgtagctaatgctaataatgtagcagaaagttctgttcaattaactactaacggtagtttatcaattagtgttaacggagctgcacaaattttgaacttaggcgattatgtaacacaagctgcagttgcaaacaactaaaaatatataaaataagacgtagtatctaaaatgacactacgtcttattttttaggatattttcgttgtactagaaagtacaaatatattctaacttttttagcgattaatagttagtgcttttttatggttgcggcaaaattcttgctataattaaggagaatgtggttctttttagagcaacttttgctaaaatagagctggttaaatatttttacggaggaaattatgtcctataaagacgatatgatgatcttcgcccttaactcaaatgtaccattagcacaaaagattgcggatcgtgtgggtgttccactttccaagtctagtgttgaacgtttcagtgatggcgaaattcaaattaatattgatgaaactgtgcgtggtaaagatgtctaccttgtacaatcaaccagtaagccagttaatgacaatttaatggaattgttgattatgattgacgctgtacgtcgtgcaagtgctcgtacaattaacattgtgatgccttactacggttatgctcgtcaagatcgtaagactcgtgctcgtgaaccaattactgctaaattggttgcagacatgcttcaagctgcaggtgctgatcgcattctttcacttgacttacatgcaccacaaattcaaggtttctttgatattccagttgataacttaatgggtgctccacttttggcagactacttcttgcgtaacggcttagagaaagacgctgttgtagtttcaccagaccacggtggtgttactcgtgctagaaagcttgctgaattcttaggttgcccaattgccatcgttgataagcgtcgtccaaaggctaatgttgctgaagttatgaacattatcggtaacgttaagggtaagcgtgctatcatcattgatgacatgattgatactgctggtactattactttagctgctcaagccttaattgatgcaggtgctactgaagtttatgctagtgcaactcatgctgttctatctggtccagctattaagagattgaacgattcaccaatcaagaatttggttttgactgattcaatcaatcaaccagcagagaagaagcttgacaagatgcttttggtatcagttggtccattgatgggcgatgctattaagtgtatccaaaaccatgaagcacttagcccattgttcaacaccagatacgaagctgacaagaacaagtaaaaattatttgaagataaagaaaacgactagtctagttgactagccgtttttttcatatgtttgagagagtttttgaaataaatgtaatgaaaagtaaatattttataaatcggttccgttagattcgatgaccttcttgtaccagtcgaatgaatccttcttgtagcgcttcatagagccgttgccatgattatcttcgtcaacatagataaaaccgtaacgcttgttcatttcgccggttgatgcacttactaagtcgatgcatccccatggtaagtagccccataaatccacgccatcttctgtgacagcttttttcatctccttgatatgactacgcaagtattcgatgcggtaatcatcatgaaccttgtgatcgtctgttagtttgtcgtaagcgccaagaccattttcaacgatgaataatgacttgtgccagcgagtagtcatccagtttaaggagtagcgcaaaccaactggatcaacaggccagccccaatcgcttgccttaacgaatggattttcaactaaatcactatattcgcgataatccatgtggtcagtgtatttaactgcaaaggacatgtagtaagagaaggcgatgtagtcaactgtaccatgtttcaagatttcgagatctttatcggtgatgtctaagttgtagtttttgcttttgaagtattgagtaagccatcttggatattcaccgttaacttgaacgtcgccgaagtagaggcgagagtccattgctctttgggcaaagaggatgtcttctggcttaggggatgcaggataaattgggcagaaggcaagcatacagccgatttgcatatctggattgattgcgtgaccaatttgtacggcttcagcactagcgaccatttcatagtgagcagcttggtacattagcttttgcttgccgtcaccttccttgaatttgatgcctgagttttcgtaaacggagatatcactttcatagttagcttgattgttaatttcgttgaaggtcatccagtacttgaccttgttgtgatagcgttcgaaacaaacgtgagcaaagcgagtgaagaagtcgatcaattttctgttgctccagctgccatattcagtgactaaatgatatggcatttcgaagtgggaaagagtcacaacaggttcgatgttgtactttaagcattcgtcaaatactttatcgtagaacgctaggccttcttcgttgggttgtgtttcgtcgccattaggaaagattctggtccaggcaattgaggtgcgaaaagccttgaaacccatttcggccattaatttgatgtcttctttatagtgatgataaaaatcaatggctttgtggttagggtagtatttatccttttcgatggtggcagtcaattcacgagggtgatttggtccgccgagagtcatgaggtcggcgattgagatgcctttgccgccttcattgtagccaccttcgagttggtgagcggcgacggcgccaccccatagaaagtttttagggaaagtagattcagtcataataaaaaactccttttgtctaacttgttataagcattatatgaaatcggtttcataaatgatagacaaaaggggcttttaggaatggttcgataaaatggctggttgtacctaaagtgaaacaggttgtttcatctatttattgtttttctttttcaattaaaatattgacgattccttcaaccaaatacattacaggtacttgtgaagaaaagtcgtaagcttcttttctaaccatttgttcatggtaggtaagggaataacggctcatttttgcgatagcgctagtttcatcgccggtgatgctgatcagaaggatatcgtcattgttgacaaatcgattgatcatttccaccatttcagtggtattacctgatacagaaaagcaaataatgacattattggtagtattttccaatttgaaaacgagcggatagaacggatccgtgacaggagaggtatttaatcctagagctgccatctttcttgcggcatattctgctaaaaaggctgaatcacccattccgatagtaataatgttgtctgcttgatagattttatctgcaacgatgttcagcttgctcaaagtatcactagggaagttatcttcggtaacgtaatgtactttcacgttgtgcaggctttggtgattgttttttaaataagctttaaattcagggaagctgttaaaacctatcttatgaataaagcgcataacagaagaactagagacgtgcgctccttgggcaatgtctctgacgcgcatgtaaattaccttatcattgttttgttcgatataacgatagatagtcatatcaacggtagatagttttgataaatctttaaatccaaaaaatgccataatcttattccttaatgtgaaaactttaaactaattgtactatattggaacactgtgttccaatcacgaaatattgagcttaaaaacagtatgatacctatctcctccaaaagccttgtctaacagcaaacgctttcatagaattaaagatgtcaaatgaaaatacgttagtaaaaaagttggaggaatttttttatgaagaattttattaacaataaaatattgccgccaattatgaaatttgttaatacaaaagctattattgccttaaaggacggtatgcttttgtcattaccattcattatgatcggttctttatttttactgcttgcttcattcccaattccagcagttgctaattggatgaatcaaacaggtttgactccattttggaatcaagcttacaatgcttcatttggtattgtagctgtatttgccgttgttggtattgcttatcaatgggctaagaatgaaggggtcgaaggactccctgctggtatgactgctttcgtaggattcctaattttgatgaattctactactccagttatgaacggaactaaaaccgttgtttctgctcaacaagctccaactcttttaacaggatttattgatcgtacttggcttgggggccaagggatgatcgctgcgatcattgttggtttacttactggttggatttatacttggtttgttaagcgtaagattactattaagttgcctgaacaagttccacctgcagttgctaactcatttattgctttgatcccagcagctgtattgactgcattatggcttcttgtatatatcttctttgaaaaggtagctcatactactttaactcaatggatttacgcaactattcaaacaccacttcaaggtataaccgactcatttggtggtatcttagttttgactttgctagtaccattcttctggttctttggtgttcacggttcaactttggttggtggtattgctggtccaattttgagtgccaacgctttgcaaaacgcagctatctttaagaaatacggttacgtagacgctgcacacggtggtcacatcgttattcaaggtttgtttgaccaattctcaactgtaactggtgcaggtatgactatcggtttggttgtcttcatgtgtttcatggctagatcagctcaaatgagaagtattggtaagttggcattggttcctggtatttttaacattaatgaacctgtattattcggtgttcctattgttatgaacccaatgcttgcacttccattctttatcatgccaccactttcggctggttcaacttacttgttaatcaaagcaggtatcttgccataccttaacggggtccaggttccatggactactccacctgtaatttctggtttcttaatcggtggttggaaagttgctatttggcaggctattatcttaatcatttcattttttgtatatttgccatttgcacgtagctatgacaacgtgctttacaaacaagaacaagctgccaaagctaaagaagaaaaataatttaaagtagaaaaaatgagcttttatctctatcatttaatttgtagaatagaagctcatttttaataggggaaaataatgaaaaaatatctctcaattgacattggcggaacgaatctgaagtatgccttaatcgacgaaaaaggacatattctagaaaaagaccgcgttaaaacagatgcaaaaaatcttactgcatttatggaaaacatgtatgaagtgatcgattcatatcaggatcaatttgaaggtatcgcaatctgtgcaccaggtaagatcgatactgaaaataagatcatttatttcggtggtgcgttaaagttccttgatggtttaaatcttcaggaagcattaggtgataaatacaatgtgccaattagtgtggagaatgatggcaaagcagccgctttatctgaacactggctcggcgaattgcgcggagtagatactggtgttgcaattactctaggcactggtgttggcggcggtgtcgttgttaataatcatcttttgcatggctggactttccaagccggtgagcttagctggatgattactaattctggtatcggcacaaagaacaaggctgcatatactggtgataattgttctgccgttaatatggttaaaaaggtaaatctagctcttggaaataaagatttagatgatggacttactgcctttgaagcgatcaataatggtgatttacgtgcattggcaatttttaaacgttactgccgcaacgttgcgattatgattattaatattcaaactgtgatcaatgcttcgaagtttgtgattggtggtggtatcagcaaccagccaatcttgattgaagaaatcaataatcaattagctaaaatccttgaagtcaacccaatgattggcaagcagatgatcccaccaaaaattgttgccgcaaagcatggcaacgattctaacttatatggtgccttgtattcgcttttgcttgaactgaataagcaataaaaaacagcctagttcgtttgaactaggctattttgatctacttattttttaacgtctgacatgaacttagcaatgcttacgctagctgtcgcaacacaagcgaccattgctgtcttacaactaatgtcgacaatatctttgactaaatccttattttcatggataaatttgaaagatgcattagtgtaatccatgcagtagccgtgaatagtgttcatcaggtctttcacttgagtgtagccactcttttcagcacgttttggttcatcctctgggttgatttgagttcttacatcattgttcataacaaatacctcactttcatttatacttatattttatttctttctaggtcttcttaagtaccttaatgcaccatttttaatatatttttgaaattgctcataaagtggatcgaaaatttgcggctgatcttcatcgtgactgagcatagttttagggaagaagaagcgttcatctccttggaaagtaccatttaatgcgcgaaccaaggggctgagttgggataactcaatcatgctgctgtcgtcttgcataatttcaatttgactattagcatttttccccgttggcttataagcatcatatggttcatcgaatgcggaattggtagcggtatagtagtcaggattaaagccagcttgcttgattaggctcttgagcttaggtaaaagatttttggtttcttcatcgattcggacactagctagcggttttctgtacaagtaacgcttggctaggtcagataagattggatcttgtgcctgggtccacatagaaaaattagtttccattactccatcatcaagctttaaataatcgtctaaagtccaattgccttcaaggaatttagtcaagctaggtgtaacttgcagatttccctttttataaacagcttgagcgcgctctaaaaggtgatgcaagatgacttccattgagcgtcctacgcggtggaagtagacctgttggtacatctgatagcgtgacacgatatagtcttcaacggcatgcatcccattgttggtaaaacaaataccattttgataaggacggattacccgtaaaattcttgataaatcgaacctaccatagttaactccggtgaaataagcatcccgctgcaaataatccatccggtcagcgtcagcttgacttgagatcattttaaccacttgcggattaggataagtcttagcgattacgctggcgactaattcaggaaagttaggtgcaacttgttttaatgcatggttaatttctgtattaggatcagtaatgatcttttgtccaattttttcatgattggtgccaaaaaggtgctcgaatgtgtgcgaatagggcccgtgaccgatgtcatgaagcaatccggcacattctaccagtaatcgattatcatcgttccagagaccgtctcctggcgtaattgagggatattttttgctaaagatatcgcaaattcttctcgttaattcataaacgcctaagttgtgctcaaatctagtgtgagttgcacctggaaaaacatagctaacaggacctaactgtttaatgcgacgcatgcgttgaaattctttagacttcagtatgtccaaaacaactttatcttcaatatgaatatagccgtgaaccggatcacggagaacaacctcttgttttaatttttcgctttgaaatcttgtcataaaaatccaccaagtttaatttattaattttttgaactatatataataaaatagattatatctaactaaaattatatcagagatatagtaataatgtttaaagggggcgcttgtttgacagcaattacgattgatttgactagtaaaattactcaagacgatgagacagagacttttacgcgacatgcgcaagggcaattgactgaagaaggcgacgtcacacgaatttcttatgccgaagaagggcaaattccagtgaagatgcttctaaaggagaatgaattgttgattcgccgcggcgttgacagcaataattattctttaatgaaatttattccgggtgaaaaaggcaactgccgctatgtagttgaagggcgccgcatggacatgaccagcgtgactaacttgcttgaatatcagagtcaagatgatggttcacgtaaacttcgggttgaatatgacctctttaatggactatacttaataggtaactatgcagtcacgttgatttttacttaaaggcctagtagaatagtaaagattgtataagagaggacgtacagctgtgggattagacaaatttaaagacaaaaatcgcgatgaattgtcaatgatcgaagttgctcgtgcaattttggaagacaatggcaagagaatggcatttgccgatattgttaatgccgtacaaaaatacttgaataagagtgacgaagaaattcgtgaacgtttaccacaattttatactaatatgaacactgatggtgaatttatctcaatgggtgaaaatgtttgggcacttcgttcatggttcccatatgaatcagttgatgaagaagttaaccaccctgaggatgaagaagacgattcacgtaagcaccacaagaaggttaatgccttcttagctagcgctactggtgatgatgacattatcgactacgataacgatgatccagaagatgacgacttagacgccacagacgatgatactgatgatgtattgccagatggcattgaaggtcaattgtcacaattaaatgatgatgatgatgatgacgaagaagataattaatttgcttgacttaagaagaaaaagcagataatatttttgttgggcaccctatgtgcgtttagctccccgttagtgggagcttttttgtttaaaggataagttaaaaggagcagaacatgacaaaatacatcttcgtaactggcggtgtcgtatcttcacttggtaaagggattactgcatcaagtttaggtcgacttcttaagaatcgtggcttgaaggtcactatgcaaaagtttgacccatatattaatattgacccaggtacaatgaatccataccaacacggtgaagtttatgttaccgacgatggtacagaagctgaccttgacttaggtcactatgaaagaatcgtaggtgttagaactagcaagtattctaacgtaactactggtaagatttaccaagaagttttggaaaaagaacgtcgtggtgactaccatggtgctactgtacaagtaattcctcatattactgacatgatcaaaaagaagatcatgcgtgcagctttgactactgattcagatgtaattatttctgaaattggtggtactgttggtgatatcgaatcaactccattcatggaagctattcgtcaaatgcgccgtgaagttggtccagaaaatgtaatgtacattcactgtactttggttccacttcttcacgctgctcatgaaatgaagactaagccaacacaacactcagttgctgagcttcgtagtattggtattcaaccaaatatgttagtgcttcgtgctgaacaaccaattgaccaagaacacaaagacaagatttctacttttacagacgtgcctgttgatcgaattattgaatcaattgatgctccttcattattcgatgtgcctttgaacttccaaaagcaaggcatggatcaaaaagtctgtgatttcttacacttagagagtccaaagccagaagctgacatggaagcttggaagaagcttgatgaacgtgctaagaccttgaagcatcacactaagattaccttggttggtaagtatgtagagcttgaagacgcttatatttcagttactgatgctttgcaacatgcgggttatctttacaacactaagattgatgttgataaggtacaagctgaagacgtaactgaagataatattgcagaaatcatgaaggattcagatggtttgattgtccctggtggttttggtactcgtggtcttgaaggaatgattactgcaattaagtatgctcgtgaacatgacatcccattcttaggtatttgtttggggatgcaaatggctagtgttgaatttgcacgcgatgtattaaaccttgaggatgctaattctgcagaagcagagccaaactgcaagaataatattatcgacattatggctgataagcgtgatgaagaaaatattggtggtactttgcggttaggtatttacccagctactcttaagaagggaactaagactcgtgcggcttacgatgatcaagatgttattcaagaacgtcaccgtcaccgttttgaattcaataatgaataccgtgaagcctttgaaaaggctggtatggtcttctcaggcgtttcaccagataaccgcttagttgaaattatcgaattaccaaagaaaaaattctttattgcagcacaatatcacccagaatttttgagtcggccacaacgtccagaaggcttatttaagtcatttattggtgcagctagtggtcttccagcacaagaattttaaagtgattaaagtttgattatacaaaatcttaagaaaacaagaactgagagacctcagctcttctaagtgtataattttttacggtaagttgaataaataattaaaaaagcccaagtcctttgaatttggacttgagctcaaacaaaaagaccagtagtctgatgttaagaacaaaaaacacattagaagctggtcttttatgaattcaattgtaactgaaatcgcaaatattataaagtctgaagataattatattaagcgtgaaagaaaaataatctgtttcttcttaaacctgattaaggaaatcatggccttggctttagctaaagttgatgatgaaatgattaccaaggttaaagcacagggctatcagattgataagaagaatgagcgctcaatcaatatggcttttggcgaagttaggtatgtcagaagaagatatgtctgcccaggcaaacaagcaaggtatcccttggatgaattaatgggctttgacaaatacaagcgctacagtattttagcagtcaaaaacatcttagaagtaagcagcgttgccacttatcgcaatactgctctagcagtcaattgcctgtctggctttaatattagccatatgcaggtgggcaatttggtaaaaatggccgggaaaaatattaaagcgggccaagaagcagattcaagatatgatgccgcaggcactaagaaaaaggtcccagttttgtatcttgaaggcgatggcgtggtgatcaaaggcactaaaagccggttggaatttcatcgctatcaggtctgtgaaggcattgtcaatataagcaagaaacgcagaaagcgaatcaatgccaaggaatttgtttctttaagccgacttgatgcgctgaacgaagccaaggagtacctggccaatacttatgatctttctgatactgtaattcttagcaacgccgatggcggtgctggatatgccaaaacagacttcgatgacattgtagggctatgcaagcgtcatgagcatttcttggatgtctttcacctaaataagaaaatcaaagaaaggctatattttgcgcctgacctgcaaggcaagctgatttctgctttggaatacaaatacagctatgacaaagttaaaactatcctaaccactgcagaaagccgactaattgatgaattgaataccgagctcaatcatgattatctggggcgcctaaggaattatattgatcgtcattgggacgatattaagccgtttaagaaacgaaaactgactgtgactaaagccattggctgctgcgagagcaaccaccgcaagtatacctaccgtgttaaggggcaaggcaagaaatggtcaaaatctggagcagaaggcatgcttaggatcttaagctgcatcaagaatcgagagctggaattttggcttagcagcgagtttgaagattcagaaataactgtattgactgaacaggaattaaaagcagcggcccgtgacagcttaaagaagcgtcatgaagttcatttaggcatccagcatggcgcattaaccgcacaggtagctggcaatagttatttaagcaagctaagcagaaatttaagtcatataaatatttaagaaattaaggttagactaatggtttaaaggctaccgcaaaaacattgacacttactcagctcttgttttttttgtaaatatcctttaacattattatgattaattgaaagtagaaaaggatttgttttcgccaatgaagcagatgataattcatggtggaaagcccctgcagggtgatgtttggatcggtggagctaagaactcaacagttgctcttattccggcatcaattttatcaagaacaccagtgaccttggaaggcgtcccaagaatagctgatgtggttaacttgatggacttgttaagtgagatggatgtacattgtgatttcggtgaaaccactttaagaatagatccaactgatatcaaaatgagtccgttgccagctggtaagattaagagtttgcgcgcttcatattactttatgggtgcgctacttggtcgctttggcaaggcagtagtgggcttccctggtggtgacgatattgggccacgtccgattgaccaacatattaagggctttgaagccttaggcgctagcgtaaaaaatgaaaatgatcaaattataattactgcaccagaagatggtttgcatggagcaaaaattcatttaaagatgccatcagttggggcaacgatgaatattattatggctagtgtgacagcacagggccagactataatcaaaaatgccgcaaaggaaccggaaattattgatttagctaccttcttgaacaatatgggggcagttattcgtagtgctggtactgactctattcgaattgaaggggtggagcagcttaaagcacagattcctcatacgattattccagacagaattgaagcagggacttatgttgctttagctgcctgtattggtaatggcattcgcattcataatattatcgaagaacaccttgattcatacctggctaaagttgaagaaatgggtgtagtaatcgattcagatgaagattctttgtatgtttacccagcgggcgacctaaaaatggtccaggtgaagacagatgtttatcctggttttgcgacagatttacagcaaccaattacaccacttttattaactgctaaaagcggtgaaggtgtagtaatcgataatatttatcctaaacggattggtcatattgctcagttgcaaaagatgggagccaatattaaagttgaagataatattattttggcccatccaactaagcagtttcatggtgcggaagtaactgcaggtgagattcgggcaggtgcctgtctgatgattgcaggcctgatggctgatggtacaacaacgatcgacaaggctggtaatatcttgcgtggttatgatcgggtccaagaaaagctgcgtcaacttggagctgatgtaactatcaaggatgatcctgctgtaccgggtattttagataatatttggtaaataaaaaccacatggaagactccgtgtggtttttgaatatgtcaatttgtaggtgaaaagaatgagtttgatttttacgagacgtgcgcaaaattcagatgtggataaaattgtgcagattttgcaggatgctattacttttttgaagaaaaatggctcaacgcagtggcaaagtggctatcctaaccgagaaacggtggaggaagacatcgaaaagcaagttgcttgggtattaactgtggataatgaagtggctggctatgcggcagtggtgattggaaaagatccaaattatgccaaaattgatggtgagtggaaaaataatgtggatacctatgcgacgatccatagaattgcggttgctagccaatttagagggatgcatttgactcaattgttcttaagtaatattatttcgctgacttatgcacaggggattcacaactttagaattgatactggcgcaaaaaataagatcgtccagcatattgcattgagtcacggttttgttcaacgagggataattcaagtagatgatccgattaatcctgatcgtttagcatatgagttgaatttatgatgaaacgcgtattaattttaggttcaccaggagcgggcaaaagtacatttgcacggaaattgcaatcaaaaacgaaattgccattggtgtatatggatcaacttttttggcatgcaaataaaactacggtctccaagcatgaattagatgaaaaagtaaagcgcatagtagctaaaccagcatggattatggatggaaactatcaacgtaccttgaaatatcgtttacccaaatgtgatacgattttttggttagattatccaactgaagtttgtctagctggcgtaaaagctagaaaaggaaaaccacgtcctgatttgccatggattgaagaagatgaagatccggaatttatgagttatattgccaagtttcggacagttcaaagaccgattttagtcaaagaattgcaaaaatatccaaataagcagatcattgtatttcattctcgccaagaagcaaatctgttcttgcacaaaataaggtaaacgaaaaaccacatggttgaaaattccgtgtggtttttgtatgcgattaattttttaatcaagcaagtcgtatttcaaagtcattaaaccatgaccttcgtcaaccatttgaccaagcagttcaacagtgttgttataaactgtatcagacatcttttgattagcagcaattaacttgtcttgtaattccttacctgaaaggttctttgcttctttgtcagtatcatgttggatcttgtgacattgtgctaaactcttttgttcaaaggcgtcttcaagttcaccgtaaacacggtagttggtatcgcctaattgagcagttaacttgttaagccaaaaaatcttgctcaagttaaatttaggagtggtttgccaagcttcaggggtagtagtgacattagtatagaatggcaccattgagttaaaggtgttaggaccaaaggctaaccattgtacacctgcaatttctgcaggaacatcattacgaatttgcaaaatatgggtttcaaagtttctgttaataccgataggacggaaggtcttcttttgttcaggagtaccttgatcgccataagcatcgtaaggagtgtcttggtagtgtgagctttcggcccatttaatatcttcaattgagattaaacgattagcatggcagataaaaggttgatcttgatctgctggagtgccaccaaagtctggatcgaaatagttgtgaatataccaagcacgaggattattgtagtgagcatccttaatagttgaagaaccaaagatgtggcgcatgttgtagccttcacggtctggattcaagtgatattcttcgattaaatcctttaggtctgctgaacaagcaaaattatcagaatcgttgaagtcgaaagtatcaatattcaaacggtttggtgcaataacatatgcatcatctgggatacggcgtgcaatccaatgatgaccaccgatagtttcaaggtaccaaatgttatccttatcagaaaaggccataccgttcatttcataagtaccgtatttttcaactaaatagccgacacgtttaacaccgtcaaaagctgagtgcaagtatggtaaagtcaaagtgacgaaatcttcttcaccaagaccaccttcacttggatcaagtaatgggtcaacaccttggatgcgtgaattagtagtgatggtttcagtagcggtcatggctacattttcagcgttaattccagctgcgccccaaataccatttttgcctgaaacatcaggtgctgaagtatagcgtaatggtgtttctgctaaatcagcgtcgtcaatcttttgtttagaaattacactagtgtagtgcttaggttggtcagctgggttaacagctttaaagccttcagggatgatgacgcggccaccgtcttcactacgagcgatcatcgtagagccatcaatagttgcttttttaccaactaaaatagtagtacattctgtttgtttcattggatcagtcctttactttatatttatgtttagagactgtaaaatagtttgtgtaaggatgaatgattccttaaatttatttctttaaacattagaaaaaggagttcctttctcgtatgattggtttgaacaaaaaaacacatacagaaagaagaactccttcatgaatgattttaccaaagattttgctcaagctctattcaatccagacaaaataaatgatttattgcgcaaagagctacaacaggctgttaataacttgctagaagctgagttgactgcctttctaggctatgatccctatgccagaaatggctggaatactggcaattctagaaatggtgcttatttccgcaaggttgatacccagtttggaccaattgaagtgcaagtgcctcgagaccgcaacggtcagtttcatcagcacacgctgcctgactacaagcagcactctgatgttttggaaagcacgattatcaagctctactccaaaggcgtaactaccagagaaatcgctgacttgattgagaaaatgtatggcagtcattatagtccagctcaagtatcaaatatttccaagcagatgctccccaaggttgaggcttatcacaagcgcaagctaagcgacaagtttttctgtgtctatttggatgcgacataccttcctttgcgccgagaaacgtttgagcgtgaagcagtctatattgccattggcatcaagcctaatgggcacaaggaggtcattgactactgcattgcacctagcgagaacattgaagtctggacagatatgcttcaaaacatgaaatcccgaggcttaaagcaagttgagctttttctttctgatggtgttgttggcatgaaaacagccttggccaggacttatcctaaagctcattttcaacgctgcttggttcatgtcatgcgcaatatctgtgctaaagtccgggtggatgaccgcgaaaagatcatgaacgaattcaagcagatacatcaacagacaagcaaaaaagaagctgcagctgtcttgcacaaattctatgccagatggaataaagcttatagcaatgtcatcaaaggtttgaaggaaattgagcccgatctgctggtcttctacaattatcccaaacaaatcagagcttcaatttattcaaccaatatgattgaatcctttaacaacgtcatcaagcgtaaagctaagcctaaggcagaatttccaactgaacagtcgcttgatgcatttattggcatccaggcaatgagctacaatgaccgctatttcaaccgaattcataaaggctttggtcaggttcaggataccttagaatcttattttgaataaataattaaaaaatcaatttgcgagaaagaactatttacacaaaagatttgacagtttctatgtttaaattatttcctaataatattgtatgcaaaaataatccgataagccaaagaatataattaatttccccgaaaggcatttggactaacaccgctatagcgtttaaatgccttggagaaggtaaattcatcgccgtagccgacttttttggcaatttgctttagattgtgtgtggtattagttaattctttcttagcggcttccatgcgcaattgcatgaggtacttttgaggtgataatttagtgttttttctgaataaagcatatagaaagctgcgtgatacgcctaatctatgacagagttcgacaatattgcaggtaggatcggtataattttgcttgagatagttaatggcaatttgatactgatcatttttcggtgttttgcggaccggtggatggttaggaaagtcttttactagatgataaaaaagttgataagttaaagcagaaatttgtaaattgtttaataaagtctttttcttatttaagtagagataaagattattgagcgtttgataaaaatctgttttttgaatttgacgcaagaaatttttattaggtaaatttgatgccttgatgctttcattaacgccgttgccagctaggccaatccagaaatattcccagggttcattgtggtcagcttgaaaggaacaagtttgactgcgtggaacgtaaaaaagatcgccagcttttaatttaactgcgtggtgtctactagaagtaaaggtaccagttccgctaataatgtaataaaaaatatcgtttttacgaagattgtcaccttgaaagaattcatcgggctgacatttttgtcgaccataaaacatgatgtagctatcaagattttggttatttaagttaggcatagacttcctcactgttgaaaaattatgttacttctattatagaagagattttgcttaaaaggtgaagaatgaaaaacgaccacattaagcggtcgttcgtgaatatttatagaaaattatgatatgtggaattataaaatgaaaaggtattttacttattggcaccacttcttccattgaataaaagattgagcagagttgcacagatgctggctacgacgataccgttgcctaagaacaattgaatggtttgggggagagtttggaagatttgaggatagacagtaacgcccaatcccatcccgattgaaatggcgacaattaaaatgttgcgattattttcaaaatcaactttagttaacattttgattccttgaacggcaatcatggtaaacatgactaacatagcgccgcctaagactgaatcagggatgatagtaactagagcaccgattttaggaagtaagcccatggccattaataagccagcagcccaatagatagggcgcttggttttaataccggataattgaagtaagccgacattttgagaaaaagtagtgtaagggaaggtgttgaaaagcccaccgaagatttgtgctaatccttctgcacgataaccttttttgaggtcttcttcggtgatatcttgatgaagtaggtcgccaatggcaaagaagacgccagtggattcgaccaaggaaactaaggcaatgatgatcatggtcaaacaagatgaccattcgaattcaggaacgccgaagtagaaaaattgaggtaagtggaaccaagaggcttgtgttacgggtgtaagtgaaactaatcccatgcaaccagcaatgatagtcccagcaattaatccaattaaaacagagatggagcggagaaatcccttagcccagacttcaatgacaacgatgatgaggatggtgataaaggcagcaataagattttttgcatcaccaaagtccttggcttgggcatttccgccacccatgttttgaaaggccacgggaatcaaagttagtccaattactgtaattaaggtcccagtaactactggcgggaagagttttttgatttttgaaaaccatccggcaattaagaaaacaaagattccagcaacgataatggcaccatacatggtgttaattgaaaatttttgcccgatcatttctaagggagctaccgcttgaattgcacagcccaaaacgactggcaagccaatgccgaaatatttattacggaatagttgaattaaagtggctaaaccacacatgaagatatcaatcgaaactaggtaagtcatctgtgtgctattgaagtgtagtgccgtaccaattaaaaggggaacagcaactgcaccggagtacattgccagcaaatgctgcaaacctaggacagcagcttttttgtgactaacttctttttgtgccatttttaattattcttctccctcgaagtgtacttgatcattttcaaagctatcgatttttgctagggcttcaaaacgtagaccttctttttctacccattcgcttccgccttggaaggtttttgcaacaacagcaccaactccaacaatgtcgcagccggcttgtttagcaatgttaaccatgcctttgactgcttcaccgtgggcaacgaagtcatcgatgattaagatatgttcgcctgggtgcaaaaatttctcttcaacgcagatcttattgttgaccttcttggtgtaagaaaagacgtcagcccaataaactgcatcattcaaagtagacggctttttctttctggcaaagatcattggcacgtgcagttggtaggctgccatgacaccaggagcaatcccggacgcttcacaagttaagaccttatcgactttttcatctttaaaaaggcgggcaaattcttcaccaacatgcatcattagttgcggatcaacttggtgattcaaaaatgaattaattttaagcacatttccaggtaaaacttcaccatcttgtttaattcgatctactaattccttcaatattattctcctcaagaaagaaataaggacttcttctacctaaaacaggtaaaagaagtccttaagattattcttaactttcattcacctatagtccggtatttacggtaccgggtagagactgtcgaccttatttcgacgatatatagatatttgtgttggcttaatcttaacagaatatattgccgaacacaagtggaaaattaaggattaatgttcgattatagtaaaaattattcagctgcgatatcgttatggcacagactgatgatcttttcgataatgccatataagatccccgcgattggccagatgatccagctgcgttcccaatcattggtaatgaagctatatcctagataaagtaagactgctattaaccaatagagtgtggcgtatttgttcataatcttgcgacagccggttaattggattgttaaattgcccaggtcaagcataatagctagggcagtagaaaagcaaaggatggctggactgcgaataattaaactaatggctaaagcgcgaaggctggcacttttttgagcagctgttaagtagccttgctcttgttgatcagataaaattggcaattcttcagttaagttattatctttgtggtttaattcaaaagaaggtgagccgcttttgagtaaataatcggtggtcactccaaataattctgataaagctacaattttttcaatatcgggaattgattgttcactttcccatttggatacagcttgccgactgacattcatcttttcagctagtgcttcttgaaaaagatgatttttcttgtgtaatgccgcaattttttgacctaatctcatgattgatcgtcctttcgttttgaaataatttgatttaacgaaaatttgcggttgcagaccaccactttttaattgcatttagcgcaactagtagttgcaactgctggttgctcaagataaaagccgaacaatgaatggctatttttaactttttgattgacctttttaatttttcctagtagagttagttaaaaatgcgtaattgaaaagagggagtaaatagtggctaagaatctagacgattttgataaaattattgtgcttgacttcggtagtcaatataaccaattaattacccgccgtattcgtgacttcggcatctattctgaacttttaccacacgatctttccatggagaagattaaacagatcaatcctaagggaatcattttctcaggtggtcctaacagtgtttacgataatggtgcattaaaggttgatcctgcaatctttaagttggatattccaattttgggtatttgttacgggatgcaattaatgtctcatgacttaggcggtaaagttgaacaagctgaaaacaaggaatatggccgcgccaacattacggttgaagatccagacagtattttgttcaatggcttgccttcaaagcaatacgtttggatgagtcacggtgatttggtaactcaagctccaaagggcttcgaagtaactgcctcaagcaaaaactgtccaattgctgcaattgctaatccagataaaaagttttatggcattcaattccacgcagaagtgcgcaattcagaatacggtttagacatcttgaagcactttgcttttgaggtttgtggtgctgaggctaactggaccatgaacgacttcatcgacatgaaggttgatgatattcgtaaggaagttggcgacaagaaagttatcttaggtctttcgggtggtgtagattctagcgttactgctactcttttacacaaagcaatcggcgatcaattaactgcaatttttgttgatcacggaatgctgcgtaaagacgaaggcaatcaagtaatgcaagccttgaacaaggatcttggtgttaacatcattcgggttaatgcccaaaagagattcttagacaagttgaaaggtgtaactgatcctgaaaagaagcgtaagattatcggtaaggaattcatcgaggtctttaacgaagaagctaagaagttaaaggatgtagatttcttagctcaaggtacgctttatactgatgttatcgagtcaggtaccaacactgcccaaacgattaagtcccatcacaacgttggtggtcttcctaaggacatgcatttcaagctgattgaaccactgcgtaagttgttcaaggacgaagtacgtgaacttggtgaaaagctgggcattccacatgacttagtatggcgtcagccattcccaggccctggtcttggtatccgtgttcttggtgaagtgactgaaaacaagcttaagattgtgcgtgattctgatgcgattttacgagaagaaatcaagaaggcaggtttacaagaaaagatctggcaatacttcactgttcttccaggtattcgctccgttggagtaatgggcgatggacgtacttatgactatacgattggtattcgtgccgtaacctcaattgatgggatgactgcagattttgcccaaattccatgggatgtacttggtcacatttcagatagaatcgtcaatgaagtagataacgttaaccgcgtagtttacgatgtgacgagtaagccaccttcaactattgagtgggaataatttcgtaccttaataagaagagaaaatcccaatatgacggcatttgaatagggtcaatattagtggaaagtaccggttgaaagcaagttgtctaccgaaaattgaatattttgcttacttttgttgaaaagtaagtgactgttgtcctacttattgtcatttgataagtggggcatttttttctctttgttgccacaaaagaaatgctgaaatccaaacggagcagtctgtttgatcgttgttgttacttatgacgaaaacataagtaaatcagatatgaaatctcgaaatgaccttgaatgaaatctcaaggtactcattctcgaatgcaatatctgatcggtcgcaaccgaaggctgaaaatttattttgccgggacggcaaacatgagggggtcattgcacgatgaagccgttaaaggatgagctaattcaaagtcgacttgatgaagatgaattagcagattttgataaagtgaagaaactgctcgatgtgaagagtaattctgttgcaattcggcagatgattaaagatgaaatgagaaagccagaaatgaatggaagcaaggtaatactgacgttgtatcagcgttattaaccaagctgtctgctgaaggtcgcctaccattgtcagaggcgttgatgggtattacaggtactaaaacatcatcacaattgagtatcttacaaaatcagttcgccgatattcaatcacagttagaaagtattatgtattcagtgacaaaaatggtcgattgaacaagtggctcatgtagttagaatcgcctacaagaccatctacaactggattgagcaaggagtattggatattggcgtggctgatttacctgaccatggaattcgccgccgacgagccaaagaaacccgtgggacttttagccatggacgttccattgaagatcgtcccgctgaagttattgaccgtcatacctcaggtcactttgaagcagatacagttttatctggaaagcgtaaaggtcaagcaatagctacgtttgtcgagcgtaagagtcgtcttatcatcgttaaacggcttcagggacgagatagtacctcaataaccaaggccattttagaattagctaaccagttagaagataatctcaagccccttactgttgaccatgggaaagaattcgctaactacaagctaattgaaaagcaggccaggattcccctatactttgcgcatgcttattctccacatgaatggggcagtaatgagaatcgcaaccgagtactacgacgctttatcccaaaggtcaaccgattgagaaaatcactgatgatgagttaattcaaattaactggtatttgaactccaggccactcaaatgtttaaactggcgcacactaattgagatctttttgcgtaatctgcgtcactaactttgttcaagttatttcttgcaatctgccgtttgaaaagagattagccttggcggttagtctcttttactatctggtaagttgactgcaaacagaaaaaagagccaagccgtcatcaaagtcgctaaaccgtgctataatgttgtcggatttaaaaataccactagttattaaatttgggaggcaagaataacgatgaagcaacttaaatttttagaaactaagcggacaccgcgttatagtttgcgtaagtttagcgttggtgtggcttcggtattattaggagtaaccatttttggaattaactttacaaatcattctgtaaaggcagcaaccatagaaagcgttaaaacttccaatagttcaccagagacgcaaggtagtgcaagtaacaatgcaacagctaataattctacagaagctgcgacaaccccacaatcttcaccagaaacgcaaggtagtgcaagtaacaatgcaacggctaataattctacagaagctgcgacaacctcacaatctttaccaaagacgcaaggtagcgctcacacttatattagatcattagcagcaagatcagcagctacgaattttatggtaacttctggttctgacagaaatgcagcaggtacagtagatcaaaataacattaatactcagctagctaaagaaaatcaagaattggccaataaggctaatctaacttcttcagataactacagttctaatatctataaaggtacagatggaaattattacaagattgtaactatttatggtcaggactacgtttaccgtgctgctgatattcaagctagtggtgctgattttaagggggatcctaaacaaacagctgaagatactaaaaataatatcaatatttctaaagaagatttaggaaatggtaagacccgttggaaggttgttttcttccctaataagggattacaaaatgttggcagtaaattaagtgggttaagttctgcaaaatttggtattgccctcacttctgactaccaaatcgttggtaatgttgacatgaaagtaattagtaatcctaatcaaacatttgaatcttatacattttagcccggtagcactagcgctactgaatttccaatacaaaatctaaaaactgaaaaagacttttcatttaatcctaagacagatgttgatccaaatactggtttaattaatagtgaaaccatgccagcttataacaatcaatatttgcaaggcccatactatttcactactgctactgatgttggtgctaagaacttatggcagacttactttaaagatgctgatgaacgtaagaatgcatatgatgggtccccttatctaggtggcaatcatgactttcattttaatacttttaaaattgcaaatgaaactggagttgacggtgcaaaatataaagacccaatcatttatgacaaactggggtataggttaaattctaaaaacggtgtagctaattctaatggcgtatatagcagtgataactttaaccaagcaatgtcatttaagtcacaaggtgtcactagtaatgcacaattttcttcttatgttatttcctttactacgcaacacacagactctcatgaagtagaattaactacaggttcgaaaaatcaacaattctcaggaatcgcagctaatatttattcttatcagaattggtactatagcatgatgtctagcttatatggtgagcagagagcactggatccagctggtgcaccaaaaacacctaaagatgttatttctggttgggttgatgccactagagctctggatgagattaagaaagactatttaaataatgctcaaattaatgttttgcggaataaaattctaaataacattacagactctgatgctgtaaataacattattaaagaaggaaattccttaaacgatgctatgaaaaatcttggtaatagtatcggacagtatgatcctgatggcagttttgctgatcacaaggaagatacaacaaagaaatctgatcgctataaatacgcaagtccagataaaaaggcagcttatgacaatgcaactgaagtaactaaagctttgattaacaaagatacaggtacctatgcagatcaagcgacggtagaacagcttactaaagatgaaaatgatgcttggaacgaacttaatggtgtcaagccaaaggataatgaggttaactctccggtcggtggtaccattactattgaaaagggacatgcattagattcaactgatgccgctaatgcaattaccaataaggatagtttgactaatgtaaaaagttattcttggtcgggtactccagatacaagtaagccaggatctattagtccaaaagtaatagttacatataatgatgatagtgctgatgaagtacctgtaactgttaaaataaaaggcgatgctgacaagtacaacccagagggcggcgaaattactgttaatagaaatactaagttaggtcctacagaggctgaagaagcaattaagaatgctcaaagtttacctaatggaacaacatatagctgggctggtaaaaaacttccggacacaagtacatcaggatcaaaagatggctgggtagtagttacatacccagatactagtcatgatatagtacctgttaagattaatgttaaaaaagatgcagaaagctacactgtaactcctaataatgaagtttcagttgataagggagaagatgtagatccagctagcttagtaacagtaaccgatccagatggcaagcaagtacaactaccagcaggttcaattgactggaaggatggcgcaaagcctgacttgactactccaggtgataaaactggtagtgttgaagttaccttcctagatggatctaagaaagacactgatgttacaattcatgtaaagactgatgcagaaacttatgatccacaagcccaaccttggactacaactgttggcaaaacgcctaaggctgatgaagtaatttcaagcactgataagaatggtaagaagatgccaagtgatgcaaaatacacttggaagactgaaccagacacaagtaaaactggtgaggcatctggtgtagtaaaagtaacttacagtgatgaaagccaagatgaagttcctgtaactattaacgtcaaggataagctagatgacaaggaaaagtaccacatctatggcaaagatggtcttaaggtagataagaacggtacattagctccacaagatgctatcgatgtaaaggatgctgatggtaataagactactttaccagaaaactcaatagtagaatggactaagaaacctgactttagtcaagctggtaaggatgtaactggcgaagtaactgtaacttatccagatccagatcacagcaaatctgatccagtaactgtaactgttcatgttaatggtaaaagtgatgaatacaaggttgcacctagagatggtgtaactgttccaagaggtagccaagttgatccagaaagaacagttgttgctcaaactccagatggtcaaccagctagtttcccagatggaactacacataaatgggtaactccccctgatacttcaacaactggtaatcgtacaggtgtagttgaaactactttcccagatggttcaactactagaactacagtcactgtaaaggttcagccaaatcaaagtgataaatatgatccacatggaccagagaatccagatgatagagtcccagtaaaaaatccagaccacttaactggtggtgataaggataatgttaagggtgaagttggcaaagaaaatccagatcttccaaaggatacagaagttacagtcgatgataagggtaacgcaacgattatctactcagatggttcaaaggataaaatcccaggtggggatttggtacgtccagaaaaagacgctgataaaaatgatccaaaaggtccaaagaacccagatgatagagtcccagtaaaagatccagaccacttaactgatggtgataaggataaggttaaggatgaaatcggcaaagaaaatccagatctgccaggtacgattgatgtcgatgataagggtaatgcaacgattacctacccagatggttcaaaggatacaatcccaggtggagatttggtacgtcaagaagataaggacaagtatgatccaaaaggcccaaagagcccagatgatagagtcccagtaaaagatccagaccacttaactgatggtgataaggataaggttaagggtgaagtcggcacagtaaatccagatcttccaaagggtacagaagttacagtaggcgatgacggtacagcaacaataaaatacccagatggttcaaaggataaaatcccaggtggggatttggtacgtccagaaaacgacgcagataaatacgatccaaaaggaccaaagaacccagatgatagagtcccagtaaaagatccagaccacttaactgatggtgataaggataaggttaagggtgaagtcggcatagtaaacccagatcttccaaagggtacagaagttacagtcgatgataagggtaatgcaacgattacttacccagatggttcaaaggataaaatcccaggtggggatttggtacgtccagaaaacgacgctgacaggcatgatccacatggaccagagaatccagatgatagagtcccagtaaaagatccagaccagttaactgatggtgataaggataaggttaagggtgaagtcggcacagtaaatccagatcttccaaagggtacagaagttgcagttggcgatgacggtacagcaacaataaaatacccagatggttcaaaggataaaatcccaggtggggatttggtacgtccagaaaacgacgcagataaatacgatccaaaaggaccaaagaacccagacgacagagtcccagtaaaagatccagaacacttaactaaagatgacaaggataaggttaaggatgaggtcggcacagtaaatccagatctgccaggtacgattgatgtcgatgacaagggtaacgcaacgattacctacccagatggttcaaaggataaaatcccaggtggagatttggtacgtccagaaaacgacgctgacaatatcacaccaaatattccaggcgataaagttacagtcaaggacccaagtcatttaactgatgatgaaaagaatcaagttaagaacaacgtcgataatgctaacaaggataagttcccagcaggcacagttattacagtaggcgatgatggtacagcaacaattacctacccagatacgtcaactgatacaatccctggtgataaattagttaagggtgaagatagcggctcaacttcaggacaaacagacgctggcaatatcacaccaaatattccaggcgacaaagtaacagtcaaggatccaagtcacttaactgatgatgaaaagaatcaagttaagaataatgtcgataatgctaacaaggataagttcccagcaggcactgaagttatagtaggcaatgatggtacagcaacaattacctacccagatggttcacaagacatcataccaggtgaccaattagttcaaggccaaaagggcgacacaactgatgctggtaacattacgccaactattccaggtggcaaggtaactgttaaggacccaagtcacttaactgatgatgaaaagaatcaggttaaggataacgttgataatgccaacaaggataagttcccagcaggcactgaagttacagtaggcgatgatggtacagcaacgattaaatacccagatggttcacaagacaccataccaggtgaccaattagttcaaggccaaaagggcgacacaactgatgctggtaacattacgccaactattccaggtggcaaggtaactgttaaggatccaagtcacttaactgatgatgaaaagaatcaagttaagaacaacgtcgataatgccaacaaggataagttcccagcaggcacagttattacagtaggcgatgatggtacaactacagtaacttacccagatggttcaaaggatgtcattgctggtactgatttagtcatcgctgctaaaagcgaagatgttcctggaagcaagcatcattcacataagaatggttcaaactctagtcaagctgatggagttaagggagcttctactgctaatggcagcatcgcaaacgctggtaacaacctaggtgttaagggtgaaagtgataatgccattggtaataacaaggctactagcttaaagacattaccacaaacaggcactaaagatacttcaattttgggtgtgcttggtatgcttttagcttcacttggtctattcgtatttaagaagaagcgcgataaagaataatttataatagttttttataaattctattggtaaaagtatctagagaaagttaattctcagatttaaaaagacgatcgaaaacttttgaaaaattgtttttgatcgcctttttgtgtgaaatgaaaacaagattctacgtaagcgtaaaataaccgagtatctagattagttttagatttcaattatgattaatttatcaatattttggaggttattcatatgtcagaaaaaaagctaatcgtccctcttgttcgtgagccaaaagctaaaaagtctaagccagctcgtaatcatttactgctttctttaaagaaaaatgacctagaattagacttccaatgtcattaagttaagctattgacttttgaaaactgatctttttaggaatcgaatcatttggattcgattcttttttttgcaaaaataaaggcgaaaagacaaacgaaatttaaaagccaagtctgcagtatattacatgtatcgcgtggcctaattaaaaaagaaatacaaactacgcttatttagcatacgcaaaaaagcatcaaattggctatctaaagccaaatgatgctttaattgtttttttctccaatgtcaatagcttaacttaatgacattgattaaatttgcgggctttatttatttttatattgccaacccaacaagcgagaaaataatttcactaattagtactaatagaacatttactaagatgcctgtaaaggttgattctttatgtggattttttacgaaagtcttagttgtgtggtaaacaagcggaatagtaagtaaactccctaaagtaataactggcaaatattttaatactattaccaatattaaaaagatgtaggctaatacatagtaacaacataaaatagtcagggcagtttttcgacctgtatagtagggcaaggttttacgtccgattttgacatcttcagccacatcgcagatgttgttggctaacatgacattggcaatgacaaaaattgccggtccagcaacgataatggctttagcccagaaaaaattatcgaagggatgcacgttatacatgttgatatataggcctaaaaatgtaatgttgtagcccattgtaattcctgaagctggttcaccaaaaggagtttttaaaatggggtaagggccacctgagtagcaatagccgattagatagcttaaaatcccgattaataaaataatccaaccgactttaatgctaaggatagttccgataattgcagaaattaacgtcaaaataatgattatttttcgagcccagcttttcgtaatattaaatttctctaggatattgttgtagctagttatatggttttgcttataacgtgcgtaatctgtgtattgattatgaccattaactgctaaatgaaagcaaatcacagctaaaaatagccataatgaatagactagattaaagttgtgataatagtagctagccatcaccgagccgataatatatggcagagccgagataataattgtttggatttggaccaaggcattgaatttttgtagtgtagaatattttttcattggttcctccataagtattaaatagccattatcttcagtataaatagatagttataatttacaattatcttgggtagaaatcttattgtttagaattaagaaagcttaatattattttttgtggtggtcgatgtaagtcagcaaagccaacaaaagcatcaaaaagctactctcgtaaaccgacatggttgaactctttctgtagtatgttgaccattgttaaaaaaggtgaacgcgtaaaatactaaatttttactctaacaaagtgtctgggaaaaagtttatttttaattaattttagactttcactcaaaaaaatcctaataaatcaaggtttattgataccaagatttattaggatttcttaatttctgagtttttcccagacactttatttagactattttcttaacttgtgcaccttatgggctagaaccatttctttattgcgatcttcatagatcatatccttgatgtaattccatgggattaacaaaggcgttttgctatttttacggaaaatgaagtctgcgtgtcgtctttccaagtgacgcaaatatcttttagcattttgaatcttagtatggtgttccaaatgcaatcgtggttcgaaatcgacgattttgtgttcagcgttgaaaataggtctaactttatggtgccagttctcagcactagagatatgatcgctgaccttttttccggcttctacgatattctctttggttgctggacttttctgatccttaaactccgcatgtggatctagatagtagttgcccaaaccatcttgacgataaagtcgtattttcttgaatgtcttatttttcttgtccattcttacttcgataacgtcaccatttttgtgattcattaaatacatgtgatgttttctagtgtaatttgcacttttcatgatcagaaatctcacctctacattaattattctgaaacgatattataccagtattttaactatatttttgctttacgagtataaaagtttataatttttaaaaagaaatttcaattcttgagaattagagaaggaaaaaatcctaatgaaggaacttaatatattttattatgctaccatttggagttttattattggagaaactgtcaaatcttttgtgtaaatagttctttctcgtaaattgattttttaattatttatttaatcaaagtaggattctaaggtgtcctgaacctgaccaaagcctttatgaattcgattgaaataacggtcattgtagctcattgcctgaataccaataaaagcatcaagcgactgttcagttggaaactctgccttaggcttagctttgcgcttgatcacattgttaaatgattcaatcatgttagtcgaataaattgaagctctgatctgcttgggatagttataaaagaccagcagatctggttctatgtctttcaagcttctgataacatggctgtaaaccttgccccatttggtatagaagtcatgcaggacagctgtggcttcttctttgtttgtctgttgatgcacctgtttgaattcgttcatgatcttttcacgatcgtcgacgcgtactttagcgcagatattgcgcatgacatgaaccaaacagcgttgaaaatgagctttaggataagtcctggccaaggctgttttcatgccaacaacaccatcagaaagaaagagttcaacttgcttcaagcctctggacttcatgttttgaagcatctctgtccagacttcaatgttctcactaggagcaatgcagtagtcaatgacttccttatgtccattaggtttaatgccaatggcaatatagactgcttcacgctcaacgctcaaacgtttctcggcgcaaaggaaggtatgtcgcatccaaatagacgcagaaaaacttgtcgcttagcttgcgtttgtggtaagcctcaacctttggaatcatctgcttggaaatatttgatacctgagctggactgtaatggctgccatacatcttttcaattagatcggctatttccctggtggtcacgcccttggagtaaagcttgataatcatgctttccaagatatccgagtgctgcttgtagtcaggcagcgtgtgctgatgaaattgaccgttgcgatcccgaggcacttgcacttcaattgggccaaattgcgtatcaactttgcggaaataagcaccatttctagagttgccagtattccagccatttctggcatagggatcatagcccagaaaggcagtcaattcagcttctagcaagttattaacagcctgttgtagttctttgcgcaataaatcatttattttgtctggattgaatagagcttgagcaaaatctttggtaaaatcattcatgaaggagttcttctttctgtatgtgttttttttgttcaaaccaatcatacgagaaaggaactcctttttctaatgtttaaagaaataaatttaaggaatcattcatccttacacaaactattttacagtctcttattggaatatgctgtgctacatatttaaacttaattaattttattatctgaaaattgaaagcaccaaaatcaagctcaagtcctgtcactattgagctttcttagacgtaattagtttttatatgatctgtttcagtgcaatttgtatgaatcgtggcagttggttaataaagtcattgattacttcatctatcttttcaaaactattctgtttaagctcttttaattctgaaattaagtagaccaatgcatctacgaatctaatatcaggtaaggattcgttcattagatagaataaatctccgattgtcttatcatctgtattttgtctttcctgccaggtcaatagatcataagttattgctgtaactgcgatatagccacattggccatcatagctttgaacttgagatttatctaaagcaagatattgcttagacgtcttaaaatatgtttcaatttgccatctacgaccataaagttggatgatttcttcagggctaagctttgtctgagtagtagctaaaaccaaatacttgttcttgtttccacggttggagacaaagacgagctttaataaaaagctatgtccatgatattgagcctcaactatgcttgaataaagataatgtttctttttacggatgtttgaagcagccaaacgatcatacaagtctttaacgctatagcggcaatggcgataaatgtaataaatctttgaactcttcttgatcatgccaagtccatctaaaccgatcttctttaaaatccaaaacattcttggagaagaaaaccaagaatcgaataagacgtatttagcttctactcctaatcgtaaggcttgtctaatcaactctacagttacatcattcatctttctctgagcttgatttctccttttaccagaaattgaacgttcatcagcagtaatgggagcagctccaatcatatttttcttggttttggttgacatcaaggcaaagttaaccggcaagaaggtattgccatcgctccagcctaaagttaaaccacgatatccgttcaaatactcatgcttgtcatggtcatagactttagctagcaattcggtctttttagaaaaagaccgagccatcagcgtatcgtcaacgataaaagcaagtcggcgtcttttatcgataaatggttttaagcagccaatgagccgggctgcaatcaagcataatagtttttgcagttgattcttccatcgttaagtacattgcgagcagttctaacggaaaaacgtttgtcatccttagctctgaataaagaaagccgagcaaaatgtactgacatcagccaagagataatcatggttaatgaaacggtggatttacgcttaaaattgacttgtttagttaacttagctagaccaattagattaataaatgaagaaattaaggatttagtatcgttttctgtgtcgatttgttctatactgttcattgcgcaggatctcctttactttttaggtcgacacttaaagtataacgcagagagatcctgcgtttttatttttgataagaaaaagccaagaggcgcggggaaagagcgttaatcttagctttcaagtttcagttttattattaattttgtctggcatgttttgtttgataaattacctgttcctagtcaggctttaccgttttttatttgtattccttttggtttcattattggtatattaattaagcgtttaggatcatatccattaactatcgaagaagttttaatgagtgttaagcaggagggaaagatcaattatcacaattggtggaaatccttaaccttaggtcttatttctttagccgcgggtggcagtattggaccagaggcttcaactactgtactaggaagtggcatggttaattggctgggagatagattacgactaattgcttattcttctgattggaaatggaatcatttttgggatactatcgtttcgaaaaaacaactaaaaaaactgccaaaatttagtagcctttttaaatcaaaattgcatcaaaaagttttttgcttaattatggttatgatcggcgtggttggtgcagcaatagtctttaaattattccctgaagaaggattatttggtattcatcatcgccatattctctggcaatggcactatagtatgtatgtaattattccattgattgtaggttggagcttcggtatgtttttcttatggagcgaaaaatggagtgattattttgctaaaaaaattactatttcaccgattattaaagcaactatatggggaatagttcttgcattacttaccttaattactagttatgccttgtattctggtgaatttcaaattgttccatttgtacaccaggcgttgcaaatatcaccattatttttgctagttatagcagtcatcaaaaccttgtctactaatataggttttagtttaggctggcgtggtggaaaaattttcccttcgatttttgctagtgtagcagttggcgcagcgattgcgcaatttttaccaattatgccagttatgtgtgtagccattacagttagtgcaagtattgcagttatcttgggtaaacctttattaacagctattttattgattctgttattaccaatagaattggctcctgtcattttagtaagtgcgtatttagctgcctgtttaacaaaagtgagctatagttttagacaaaagaataattagggaggtatttttatgaacgaaaaaaacgatgcagtaactggtgcttctttgatagagaatcaagaagaaaaagtaaaaagcccatggccgggtcctaaaggtatgattcctgtaacaagtgggcgtgctgacgatgctaatgtacataatcgtgcctacttagacaatatcttggtggagatgcgtttgcttgattcagttgagccagacttaacaactgagatttttggtaaaaaatatgcctcacctttaactctggctgcagtctctcatttgaacaaggttttaccagataagacacataagccaatgcaagaaaaggcacgtgcggctaagaataccaatactttaaattggattggtatggagtcaaacgaagaatatgccgaaattgtcaaagagggcggcgatacagttagaattgtgaagccttacgcagaccatgataaaattatgggcgaactaaaacaagcagaagaattaggtgccgtagctgttggaatggatattgatcatgtgcctggtgataatggtaaatatgatgtagtcgatggtattccactaggaccgatttcatttagcgatcttgaaaagtatgttcatgcagttaaactgccgtttgtggctaagggcgtgctatccgtgcgtgatgccgttaaggctagagatgctggtgccaaggcaatagttgtttcacatcaccacggccgcgttccatttggcgtgccaccactaaaagttttgccagcaatcaagcaagcactaaatggcagtggaatgaccatttttgtagatggatcattgatgacaggctacgatgcatacaaggctttggcattaagcgcagatgctgtactgattggtcgagggattctttctgaattgttaaaagatgggcaaaaagcaacagaagataagattaagaaaatgaatgagcagcttgcacaaatgatgttgtatactggcgttagagatactaaatcatttgatcctagtgtgttacattttgattaggatagaaaaatgaaatagtttattttttacagtttactataattaagtggctattagcctataataaaggcgtttaaagctatactgaatagtgttatgcttaactcggacgttgttataaggtaattatttaaaagtaattagttgtatacgaaaacatgcttagctctggtaaaagctaagcatgatgtctcataatattgagccgcttgtagattatactacaagcggttttattttagatgaaaataacaagtatttcaaaaagtgagtatctatgttttgctattatggaaatggattgatttagaaaatgatgctattgaaatttcattatgagcggggatgcaaaaccttttttaaaaagcataagaatgagcaaaagataattaagcagttaatcgatcaagcgattactaaggaattggcaactggtatgactaaagtgaagatcgctgcaatgactcggattgagggaaaatcaatttacgagtttcgcctaaatttgaaaaaagcgggttcagcgagagtcgcttttgcagtaaaggatgagcaagtactagttcttttgattacctctaatttacagaaggatagttttagtcatgaattagaaactgttctgaaaggaagtcattatgcgtttaattccaattaagcaggcagagactttgctcaaaaaaatgtgtagtaataaaagtaaatatgtagaaattaaattattaacggcaaaaaaggatcgttcaattagtgtgaaaaatgatggtaaaaagctaattttaactgaagatggctatttgaactttacgcaggaatatgaattgactgatccagctgttggccgtcatgcagttttagcggcttttaaaaaggaatttccgcgtagtaatcgtgcgtatctgattgctaaatggtatactttaactataagaaaaactatcagtgttgatcagaaaggaagtctttttatcaatgaaatatgcagaaaaatctcccgcattatgggatgccattcatcatgaagaacagcgccaacaagacgtcatcgaattaattgcctctgaaaatattgtttctgatgcagttcgtgaagcacaaggttctgttttaactaacaagtatgctgaaggatatcctggtcggcgttattacggcggttgtcaatatattgatcaagttgagcaactggctattgattatgcaaaaaaattgtttaacgcaaagtttgctaatgtgcagccatactctggatcacaggctaacatggcagtttatcaagcacttttgaagccaggtgatgtcattttaggtatgggaatggatgctggcggtcacttgactcatggatccaaggttaacttcagtggtaaggaatataagtcttacagttacggtctaaatgttgagactgaagaactagattttgatgccattcgtgaaattgctcttaaggttaaacctaagttaattgtagccggtgcttctgcgtacagccgcatcattgattggcaaaagttccgtgaaattgcagatgaagttagggcatacttaatggttgatatggctcatattgctggcttagtagcaaccggtcaacatccaagtcctgttccagtagctgatgtagtaactacaactacacataagaccttgcgtggccctcgtggtgggatgattttgtccaacaatttagaaattggtaagaaaatcaattccgctttgttcccaggcattcaaggtgggccgcttgagcatgtcatcgcaggtaaagcgcaagcattttatgaggacttgcaaccacaatttacagattatattaagcaagtcattaaaaatgctaaggcaatggcagaaacttttgctgaatcggacaatattcgtgtcgtatctggtggtactgataaccatttgatgattatcgatattactaagactggtattaccggtaaagatgctcaaaatttactcgactttgttcacatcactaccaacaaagaatcaattccaggcgatcaacgttcaccatttgttactagtgggttgcggattggtacgccagcaattactagtcgtggctttgatgaagtagatgctaagaagactgcggaaatgattattgaaattttatctgatccagaaaattccgcaacgattgctcatgttaaagaagaagttcaggcattaactaaaaaacatccaattgaataatttgtgtagcagaatttagccgtcctagttctcagctgggggcggcttttgttataataaaaaattaaaaataatggagttaagagtgaaggaaacgtgattatttggaaaaattaaaaagacataaaataggcttattttcagcgattatgctggccttgaattccttaattggttcggggtggctttttggttcaggttctgcagcacaaattgcaggtccagccgcaattttatcttggattttaggtgcagtaattatcatctcaattgcattgacttatgtagaattaggttcgatgtttcccgaaagtggcgggatgagtcgatacgctcaatatagtcatgggccgttattgggctttgtggctgcttgggctaactggatttcactagtcacattggtaccgatggaagccgtagctgccgtgcaatatatgagttcttggccctggagctgggctaactggactaaaaattttattaaaaacggcagtattacttttgctggcttaggtgtggttattatttttatgctgatttttacaatgatcaattttgggtcagttaaaatcatgacccattttaccaatttgatttctatttttaagatcttattgcctactttgacgattacagttttaattgcttcaggttttcatggacaaaactttggcagtaatttacatgaatttatgccttatggtagtcggtccatctttgaagcaacttctgtttcaggaattatcatgtcctatgatgcctttcagacggtcatcaatatgggtggggaattgaaaaatccgcgtaagaatattgtgcgtggggtattgatttcaatgttaattactgcggcaatctacattatgttgcaagtgacttttattggtgcagttgagccaggcatgttagctaaagtaggctggcatggagttaactttacctcaccatttgcggacatcgctattattttaggcatcaattggttagtaattttgctctacctagatgcatttgtttcaccatttggaacaggggtagcatttgtagctacggcctcaagagccctagcggcaatgacacacacacgtcatttgccaaaatggttaggtagattgaatcaaaaatacttaataccacgttatgcgatgattgctgactttgttttggcggttattttagtaagcttatttagaaactggaatttactagcaacagtaatcacggcctcaactttgattgcatatttgactggtccagttacggtaatgactctaagaaagaaaagaccagatcttgatcgtccatttaatcctggttatatgaagtggctagctccagttacctttatactaactagtttggcaatttactggtcaatgtggccaacgactattcaggtgataattgttattgccttgggtttgccgatttatttttattatgaaattcactaccaacattcaaatttaaaagaacaattacatagtagttggtggatgatcggttatttgatttttatgtcacttatgtcctttgtgggcagtagcggttttggtggtcagaactggattaagtatccatttgactttgtagtaattatcattatttctctcgccttctattattggggaattaagacagggttaaagaaaatcgatccttatgctgaaaaaattgcgcaaaataaagaataagtaaaaaaactgttgggatttttggtctcaacagttttttgttcgctattctgcttcatcaagatacttatttagtaccttgaaaacaccgttgtcgttattagtaggtgcaataaatttagcagtctttttaacgatatcttgaccattagccatggcataacttaaaccagcaaatttcaacatttcaaggtcattttcaccatcaccgaaggcaattaattcacttcttggcacgtctaaataagctaaaaattcctttagccctgcggctttatttacaccttcaggaataatatccatgtagctccaaccactagttgtgacgtggattttttctgtactacggctgttgaagccatgttctaattcatgtcgaatcttgctgggatagtccattgtgatcttagtgtattggtcatcagcaggaattttattaaaatcatcaatttcgatgctattaggataaaaataatgatgggaccgcttgtattctggtggtgtactttttaaaaagtaggagtgcttaacgccactgattaaaatgttttgggctgcaccaggatagcgtgcgtgcaaatattcaataaaatttaggatgcatttttttgaaaagcttgttgtacgaataatttttccatcgcgaactaagaccgcaccattgtcggcaacaaagtcaatagaatcgataaattcgctaaagtcatcagccaaacgaccagctgggcggccgctagcaataataaaatgtgccccgtgttgatgcagacgagttaaaatctcgctaaacatttgatgatcgtattgtttttcatcgttaacaaaagtaccgtcaacgtctacagcaacggccttgaagggaagagtagtcatctaattacctcactaaaatttgataccgttaacagtttaccatttcttgcaagtgcttacacaaattatttatattatgtttaacaataaatttgaaatttacgaggtagaaaaaatgacaccatggtggaaaaaagcagttgtttatcaaatttatcctaagtcatttcaggacagcaacggtgatagcataggtgacttacaaggaattattgctcgtttagattatttggaaaatctaggagttgatgcaatttggctttcaccggtctatcaatctcccggtgtggataatggctatgatatttcaaattatgaagcgattgatccgcaatatggcacgatggctgatatggatgagttgattcagaaagctaaggagcatcatatccgaattgtaatggatctggtggttaatcatacatctgaccagcatcaatggtttgtggaggcacgaaaaagtaaggataatccttaccgagactattatatttggcgtgatcctgttgatggacatgagcccaatagtttgaagtctgctttttctggttcagcttggaaatttgatgagcaaacaggacaatattatttacacttctttgcggaacaacaacctgatttaaattggaaaaatccagagttgcggcaaaaaatctacgatatgatgaacttttggcttgataaggggatcggtggcttccgaatggatgtgattgaattaattggtaaagatcccgacaaaatgatccgtgaaaatggtccgatgcttcatccatatttgcaagaaatgaacaagaatacatttggtgatcgagatgtgatgacggtgggcgaaacttggaatgcgacaccgaagattgcagaagagtactcagatccagcacgtcatgaattatcaatggttttccaatttgagaatcaagctttagaccagcaggagggaaaagaaaagtgggatttaaagccgctagacttaggcgaattgaaaaaggttttagtaaagtggcagacagagcttgattttaatcatgcttggaatagtttgttctgggaaaatcatgatattccgcgcgtaatttcacgttggggcaatgataaaaaatatcgggtgcagtgtgctaagatgtttgcgacagttttacatttgatgcacggcacaccatatatttttaacggtgaagaaattggtatgactaattgtccggtaaaaaatattgatgaagtagaagatattgaaagtgtcaatatgtatcatgaacgtctggctgaaggttatgacaaagataaactaattcatgcgatcaatgttaaaggcagggataatgctcgtcgtccaatgcaatggaatgatgagaaaaatgccggctttactaagtcaaagccatggttgacagtaaatcctaactacaaagaaattaatgtgaagaaggccttggctgatcctaattcgattttttatacttaccaagaattgattactttacgtcatgaaaatgagattgtggttaatggtgactttaagttggttcatgatactggtgatgaagttcttgcatattatcgtattttaggtactgaaaagtggttggtggttgctaacctatctggtgaagagcaacagtttacgtcgaccgatcgcattaaagaaaacttgcttagtaattatgctgtgcgtaatgatctgcatgatattacgcttaagccttatgaagcatttgcagtggcaattaaataagctaaaattaaaaagaacttgaattactaacttgaagatgttattctagttatcgttaatcgattaatctatgatctgtgatatgatcatggcaaaggagtaataaattatgaaacaaggtattcatccagaatttcaagaagtagttttcatggactcagcaactggtgctaagttcttagctggctcaactttgaagccatcagaaactattgactacgaaggcgaaacttacccattagtacgtgttgaagtttcatcagattcacacccattctacactggcaagcaaaagtttgctcaagcagatggtcgaatcgaaaagttcaacaagaagtacggtttgaagaagtaaaccttttatctggtggaagcagtcccattggggctgcttttttcgttagagattatttggcagaatgcatgaaagacagtataatgttttctgtataaaaatgtttttatgggagtaaatattcaatgaaaatgcaaatggcggaaattgccaaggctttaaatactacttgtgaaggtgacaatcaaactgttattacttctgttgcctttgactccagaaagatcacagatggtggattatttgtaccacttgaaggtgaacgtgatgggcacgaattcatagctagtgctattaataatggtgcttctgctactttatggaaaaaggggcatccgaacaagccagaagatattgcggttattgaagttgatgatccgcttgctgctatgcaagagcttgctcgctattatttgcgtaaggttaatccaaccgtagtgggaattactggttcaaatggtaagactactaccaaggatatgattgctgctgttttgtctaaacgctttaatgtacataaaactcaggccaactttaacaatgagattggtgtgccaatgaccatccttgagatgaagccaaatactgaaattttggtgcttgaaatgggaatggacagaccaggtcaattgcatcatttaagtgaattaacccatccagatgtggccgtaattacaatgattggtgaagctcatattgaattctttggcagccgcgacaagattgcagatgctaagatggaaattactgactttttgcgtgaagatggcgaatttatcttcaatggggatgaaccattattgcaagaacgtgctgagaaattggatcaagctaaagcaacttttggttttagagatgaagatacagttcatgcaactggctttaagagttatatgcatcatgctacctttacagttaatgattcagagcaaaaattctcaatcccaatgattggtaaacacaatgtttctaacgcaatggccgcaattagtgttggtcgtcattttggtgaaagtgatgaggaaattgcctcatcattgtctaactttaccccaacggctaatcggatggagtgggaaaaaggcgatgctggcgaaagcatcatgagtgatatctataactcaaatccaactgctgttagagctgtattgactagttttggccaagttgaagtaaaagatggtggtcgtagaattgctgttttaggtgatatgcttgaattaggtaaaaagtcgccggaattgcatgctggtcttgcagatacaatggatccccagattattaacgaagtttacttatatggctctgaaatgaagaatttatatgatgctttacaaggcaaatatgagccagaacatttgcattattatacacaagaacaaacagatcgaatgattgatgatctgaagaacgatattaagtcggatgacattgtagtattgaaaggttcgcatggaatgcacctagaaaatgtcttagcccgactgagataggagaaaaatttttttgaaattttcagaattaggattaaatgatgcgcttcttaaagcgattaaacgttcaggctttgaagaagcaactccaatccaagaacaaactattccccttgctttgcaaggcaaagatgtaattggtcaggcccagactggtaccggtaagacagctgcgtttggcttgccaattttacagatgatcgacaaaaaagaaaaagcaattcaagcggttattattgaaccaacgcgtgaacttgctattcagacgcaagaagaattattccgtttaggtcgtgacgaacatgctcatgttcaagtggtctatggtggagctgatatcggtcgtcaaattcgctcattgaaacaccatgtaccatcaattttagttggtacgccagggcgtttgcttgaccacttgaaacgcaaaactattaatttagatcaagttaaggctgtcgttctagatgaagcagatgaaatgctcgatatgggttttattcaagatatcgaaagtattttgaaatatgctaagaaccgacaacagacattactctttagtgctacaatgcctaagccaattttgcggataggcgaaaaatttatggatcacccagaaattgtccgcattaaagctaaggaattaactgctgatttgattgaacaatattttgttcgtgctaaagagtctgaaaaatttgatattatgtgtcgactaattgacgtgcagggtccagatttggctttagtctttggtcgcaccaaacgtcgcgtagatgaacttacgcgcggtttgcaagcgcgtggctacaatgcggcggaaattcacggtgatctatcgcaagcgcgtagaatgtcagttttgaaaagatttcgtgaaggtaagctagatattctggttgctactgatgtagctgcccgcggacttgatatttcaggcgtaacccacgtttataattatgatattccccaagatccggattcatatgttcaccgtattggtagaactggtcgtgcggggcaaaatggaatctctgttacttttgttacgccaaacgagattggctatatgagaaccattgagcaattgactaaaaagaagatgtcgccgcttcgtccgccaacagatgatcaggcattacatggtcaattaaagcaagcaaaaattgaaattgaagatttgatgaacggtgatttgggtaaatatacccaaggggcaagtgagctgctggataactattcagctctcgacttagttgcagcctttttaaagaacttggctaaagatgaggttaaagtcaagattaccccagaaaagccgttaccatacaagggtgatggtcgccgccgtcgtggtaaaggtcatggccgtagcaataataatcatggacgcgataaccaccgccgtcgtaacaataattcataccgccaaaatggaaaccgcggtaagcgtggtcgtggcaacggacatgaatttgtaatcaagaataagaaagattaagattttatcttaaaaagggaagttgtaatttttacagcttcttttttgtattataatgatgtcattgtgtgaggtgaaaataatgattaaaggagtaggaattgactcgattgaagttgaacgagttaagaagatcgtggacaagggggatgcttttgccaaaaaagtattaactcccaaagaatttgatcaatatcaaaaaatggcaggcaaacgtaaagttgaatacctaggcggacgcttttcattaaaggaatctttttctaaagcaatgagaacgggtctgggaaagtatattggttttcaagatgtcgaaactttatgggatgatttaggtcatcccgttatgacttcaactaagtttgatggaaatattttcccaagtatcacacatgataatcatgaaattattacatttgtagttttggaggaaaaataaaaatatggttccaggctatcaccgtccagccgttgtaaaggtaaatttgggcgcaattagaagaaatataaaaaacgaaatgaaacatcttgcaacagggcaaaagatgttagctgtagttaaggccaatgcttatggtcatggtgcagttgaggtggctaaaattgcgattgaggaaggtgcagcaggcctttgtgtagctattttagatgaggccttgcaattgcgtcatgctgacattgttaagccaattttagttttgggagtagtttctccagaatacgctccaattgcggccgcaaacaatgtttcattaacgattcctaaccttgaatggctaaaggaagcagaaaagtaccttgaaaaagagcagttacagttgaaagttcatattggagtagattcaggcatgggtcggatcggctttaacgaagatgaggattttattgctgctaataaattcttacaaaataacgataatttctacgtagagggtatgttcgcacactttgcttccgcagacagtgctgatgatacttactttaagcatcaggtagaaaaatttgctcatatgagaagtttgttgacagttaagcctaagtggattcacgtagacaataccgctgccagcatctttaacaaggatgtgcctagtgattgtgttcgttttggaattggcatttatggtttgaacccatcctctaatcctgatagtcctgacttgaagtcatcaatttcgcttgaaccagcattatcatttgagagtgaactaactcatgtaaaaactattcatgaaggtgacggagtaggatatggttctacctttgtagctgatcaagatacaattattggaactgtgcctgttggttatgctgatggctttattagaaagtttcaaggctttaaagttaaagttggagacgaatactgtccaattgtcggccgaatttgtatggatcaatttatggtcaaaatgccaaagaaaatgccgttaggaactaaggtggtcatcatttccaatgatccaacagcgccaaataatattaaggccgccgcagattatgttgatactattcactatgaagtagcatgtttgttaaacgatcgtttacctcgtgtttactatgaaaaataagttaggcaataaaaaaatgcttctagaacaaaaatctagaagcattttttggtagatcagttttttaatccttaacagggtgttcaataaagacacctggattttcgtcactcataatagtcatgccggcttgcaaatcttcgatttcagaaactacgaaaccttttctttgtaacttatcaacaatcgttctcatggtaatatctgagacaccagcggggagagtaaagagtgttcttctaacaaaattaccttcgagttcgccagcagctgcatcaagtgtcattacactagacatattagtgtgcttagacacaatcttggacatcttgatcaagttaccacgtgtattgtcagataaaacggtcaaaacgtatgaaccatttttaacatcccacgcatctgacaacatatcaagcattcttgagtgagtaagaataccataaaaatgattatcttcatcaaggacagcaatataaggtaagtccttaatgttgaaaaataccttgaagaatggtgaattgaccttaattgtcttagtggcattcttaagtaagtaagttactggtagattcatatcgccaccttgtgacttatgacggtagatatgcatcttataaatgttaccacggaaaatagtaccagtatcgtcaacgattggcacacatctgtagcctgaatcttctaaaacttttaaagcttctgctaatgtggctttttcattaactgttgttaaataatcttttttaataactaaagatttaataagcatgagttcgcctccgaaagtgagaaatgtttcaagtaattatagcatagttgatgagttaattaaatattaattaaagttcatctgaagtaacaactatattttaacaatagttagacaaataaaaaagcatctccgaaaaaagagatgcttttaagtgaaacaagttttagattattgacgaaccttaacgccagtttccttaaatgccttgtccataaccttcttcaattgatctgcagaagcagtcatcaattcttgttccttgtcacttaatggcatttcaatgatttgttcaagacccttacggccaacaactgcaggagtaccaatgtgaatgtcatgtaagccatattgaccgtccataggaactgaaagtggaagtacacggtgttcatcgttcaagatagccttagcgatcattgctgaagcagtaccgattccgtagaaagtagcacccttcttgttaattatttcgtaagccatgttagcaacttccttgtggatgtcttcaagcttagattcatccataccgtgagccttaacccagtcactaacctttacgccaccaacattgttgtagctccatgctgggaattcagtatcaccgtgttcaccaagcatgtaagcattaactgaacgtgggtcaacatgttccatttcaccgataaccttttgaagacgaccagtatcaagtgaagtacctgaaccgataacacgatccttagggaaacctgacattttccaagttgcgtgggttaaaatatcaactgggttagcaacaactaagaaaataccttcaaagcctgattcaacaactggttcaacgattgatgataaaatcttcaagttcttgttaacaaggtcaagacgagtttcgcctggcttttgtggagcaccagcagtgataactactaagtctgcatccttacagtcagggtagtcagctgcatagatattctttggtgaagtccaaggggtagcatcagctaagtcaattgcgtcaccttcaacgtgttccttagcgatatcaataatacccaattcttcggcgataccttgttgtaccattgagaatgcgaaggttgaacctacagcaccatcaccaacaagaataactttacgaggtctttcatctcttggcataaataaaaatctccttttttattagtgatatttttaacaaaatgaattataccatgatagcaagcattaataaaattattatttcctaattgtgctattatatgtaagattgtgtgcatagtgaggagtaaaaataatgaagataattgcaggtttaggtaatccaggacaaaaatatgataaaacaaagcataatactggtttcatgacaatggatcattatttgaatgaaaagggtttgtcactggataaagataaatttgaaggtcattggactaagcaaaaaataaatggtgaagatgtaattttgcttgagccgcaaacctttatgaatgaatcaggtcgttcagttagtcaagtggctaacttctttaaggttgatccagcagatgtgctaattattcaagatgatatggatatgccaattggtaaaattagaattagagctaatggcaaatctggtggacataatggaattaaaagcatcattcgagatttagggacggaaaagtttaatcgtttgaagattggtattcgtcatccgaaaaatgcaacggttgtttcatgggttttgacaccatttaatgatgaacaacaaaaattgatggatgatgcatttgcgataagtgtagatattattgacgactttatcagcggacatggtagtcaatatttaatgaataaatataattaaaatgcgtttaacagagattttagataaagatcaagatttaaataattttatttcaaaaacaaaacaagtaaaaaattcactaatcactggcgctaatgccggtgcttttagtctattgctaaaacagataacaactaaattagcagctccacttattttaattgaagaaaacgaaagtaaagcacaaaacttatatggtgaactcagtgccattatggcagatgaaactgtgcaaatttttccagtagatgctacaattgcaacgcaaacggcagttagttcgcctgatgaactgagcagccgaattcaggcacttaattttttgttaagtggtaaggcaggaatagtggtaacaacgccgcaggggctgcaatacaaactgaccaatccaactgattttgcgcaggcaaagcggagttttgagccaggtcaagaatatgaactaaaagaactcaatgaatggttgcttgcttcagggtatcagcgtgattctttggtagcacggccaggcgaattcgccatccgtggtgatattttagatgtttatccactagatcgagaaaatcccgtgcgaatcgaattctttggtgacgaaatagatacaattaaggaattcgatttagctagtcaacggagtcaaaaagagttagacaaagtagaagttgcagcagctcaagatcgagtttttactaaggatgcaattgcggcagcggctaagaaaattgaacaagatatggccagtgcaccagctcccgctaaagctgtcaaggaccactttgcggcagttcttgatgaattaaacgatggcggtttacctaaaaactatgctttcttaattgactatttgcttgaaatttctagtagtttactcgaatatttgcctaaaaatgggcagattttattttacgatttgcctttaattaatcaagcggttgaaacagttgataagcaaaacgctgcttttattaatgatgaactaaaaactggtgcaatgttgccagggcaaagcttgcggtcagattatacaaagattctgagcaaagataagcaccatcgtatttatttctcattgtttcaacgaagcatgggacgactgcgcttaggccagatgctcaattggtcaacacgtgagccagaacaattctttagtcaaatgccgctgattaagtcagaattagaatcttatcaaaaggcggggcaaaccgtcattttacaggctgataatgaaaaaagagcacagcaaattgatcaaacaatggttgattttggcttaaatttaccaattgttggtgcagacgaaattgttgaacaacggacacaaattgtagttgatggctttgttagtggctttagtttaccaacagttaaattggtatatctaacggagcgtgaactatttaataagcgcccacaacgtaaaaaaagaattaagacactggagaatgcccagcgtttgcgcaattatactgaactgaagccaggggattatgttgttcatgttaaccacgggattggtcggtttgaaggaatcaagactttagaaaataatggtaccaagcgtgactatattacgattacctaccagcatggtgatcagctttttgtaccagcagatcaattaagcttagtacaaaaatacgttggttcagaaggtaagacaccacatattaataagctaggtggtagtgagtgggctaaaaccaagcgtaaggttcaatctaaagttgaagatattgcggatgatttgattgaactttatgccaaacgtgaatcagaaaaaggctttgctttttcacctgatgatgatctacaaaaacaatttgaagatgcctttccttatccagaaacacctgatcaattgcgatcggttaaagaaattaagcaagatatggaaagctcgaagccaatggaccgtcttttagtaggggatgttggttttggaaaaactgaggtagccttacgagcagcttttaaggcaattcaggataataaacaagtagcctttttagtacccaccactattttggcgcaacaacactatgagacgattcaagatcgcttcaaagatttcccagtcaatactactatgctatctcgttttcaaacgccagttgaatcaaaggaaattattgaagggctaaaaaatggcaagatagatttggttgttgggactcaccgtattttgtctcaagatgtaaaattcaagaatctaggattgttaattgttgacgaggagcagcggtttggcgttaagcacaaggaaaagttaaagcagttgaaggcaaatattgatgttttgacattaacagctacgccaataccgcgaacgcttcatatgtcaatggtaggtgtgcgtgatctctcagtaatggaaacgccacctcaaaacagataccctattcaaacttatgtgatggaacaaattcctagtgtagtaagggatgcatgcttgcgtgaaatgcaacgtgatggacaggtcttttatttacataatcggattagtgatatcgatgaaactgtcgaaaaactgcaggaattgatgccacaggcgcgaattgcagctgcccatggtcgaatgagtcagaatcagttggaagatattctttatcgcttcctgaatcgcgagtttgatatcttggttacgactacgattattgaaacaggaattgatatgcccaatgtcaatacaatgatcattgaagatgctgaccactatggtctaagtcagttgtatcaattgcggggtagaattggccgtagtgctcgtttggcttatgcttacttcttgtataagccaaataaagttttaactgaggttggtgaaaaacggcttgatgcgatccgtgacttcactgaactgggttctggtttcaaaatagcaatgcgtgacttatcaattcgtggtgctggaaatatgctgggtgcacaacagcatggctttattgatagcgttggttatgatttgtactcacaaatgctggctgatgcaattcaagaccgtaaggggaagacaacaatcaaaaagtcaaacgcagaaatcgaccttggacttgaggcttatattccagattcgtatatcggtgatcaagaagaaaaaattgaattttacaaaaagattaaagccgtctcaagtcaggaagaattaggtaaaattgaagatgaattaatcgatcgttttggtgactatccaacggccgtcgagaatttattagctgttgccggtctaaaggttgatgctgacatggctcaagtgctcaatgtggttaaaactgacgataagattaaagtggaatttacgaatgcagcttcacgcaaacttgagggacctaatatttttaaggcattggagcatgtaagtttaaaggctcgcattagtatgaatcaagaaaaaagaatggttgtcttgctattgttgccggataaaatgaagaatcgtgttttattcaatgaactagcaacctttttacaggcagcaagcgacattgtacaaaggtaactgtaggagaaaaatatgaggattgataaatttttaaaagtttcacgattagttaagagaagaaccgtagctaaagaaatggctgatcaaggtagaatcaaagtcaatggtcgagttgtaaaatcaagctacgatgtaaaaattgatgatattattgaagtaggttacggcgccaaaaccatcaaggctaaggtgttaaatattcgcgagaccacgaaaaaagcagaagcaagtgaactgtacgagctagctaagtgtataattttttacggtaagttgaataaataattaaaaaagcccaagtcctttgaatttggacttgagctcaaacaaaaagaccagtagtctgatgttaagaacaaaaaacacattagaagctggtcttttatgaattcaattgtaactgaaatcgcaaatattataaagtctgaagataattatattaagcgtgaaagaaaaataatctgtttcttcttaaacctgattaaggaaatcatggccttggctttagctaaagttgatgatgaaatgattaccaaggttaaagcacagggctatcagattgataagaagaatgagcgctcaatcaatatggcttttggcgaagttaggtatgtcagaagaagatatgtctgcccaggcaaacaagcaaggtatcccttggatgaattaatgggctttgacaaatacaagcgctacagtattttagcagtcaaaaacatcttagaagtaagcagcgttgccacttatcgcaatactgctctagcagtcaattgcctgtctggctttaatattagccatatgcaggtgggcaatttggtaaaaatggccgggaaaaatattaaagcgggccaagaagcagattcaagatatgatgccgcaggcactaagaaaaaggtcccagttttgtatcttgaaggcgatggcgtggtgatcaaaggcactaaaagccggttggaatttcatcgctatcaggtctgtgaaggcattgtcaatataagcaagaaacgcagaaagcgaatcaatgccaaggaatttgtttctttaagccgacttgatgcgctgaacgaagccaaggagtacctggccaatacttatgatctttctgatactgtaattcttagcaacgccgatggcggtgctggatatgccaaaacagacttcgatgacattgtagggctatgcaagcgtcatgagcatttcttggatgtctttcacctaaataagaaaatcaaagaaaggctatattttgcgcctgacctgcaaggcaagctgatttctgctttggaatacaaatacagctatgacaaagttaaaactatcctaaccactgcagaaagccgactaattgatgaattgaataccgagctcaatcatgattatctggggcgcctaaggaattatattgatcgtcattgggacgatattaagccgtttaagaaacgaaaactgactgtgactaaagccattggctgctgcgagagcaaccaccgcaagtatacctaccgtgttaaggggcaaggcaagaaatggtcaaaatctggagcagaaggcatgcttaggatcttaagctgcatcaagaatcgagagctggaattttggcttagcagcgagtttgaagattcagaaataactgtattgactgaacaggaattaaaagcagcggcccgtgacagcttaaagaagcgtcatgaagttcatttaggcatccagcatggcgcattaaccgcacaggtagctggcaatagttatttaagcaagctaagcagaaatttaagtcatataaatatttaagaaattaaggttagactaatggtttaaaggctaccgcaaaaacattgacacttacacgagctagttgattaatgacttttgattaaatcgttgttatacttgacttagtatagttatttagtaattaggggattaaacaatgaatcatggtccacgtatatataattcgttgagtccagaagagcagagggcgcgtcttagacgtaaacaggctaaattagagaaagaaacacaccgcaagcggttgaacgtaattatggcagtttttgctatcattttcgttgctttaggtgtacagattgcaatcaagatttctcaaactggacgactgaataatcaagtacaagctgaaaaacagactttaactaaagtaaaaaataagagaaatgacttagaaactgaaaagcaggatttgaaggatccaaattatgttgctaagctgattcgttataaattctattattctaaatcaaatgagaagatttataacgtgcatgaaagaaatgatgataactaatggaaaagtatcaagctggtaatcgggtgactggtgtaattaataacattactgacttgggcatctttgttactttacctaatcggcattctggtttggttcatcatagtgactttggcaataattggctacgcgaacgtcgtcgttatcatgctggcgatgaagtgcgcgtggttgtggtgcacatccataaagggagatttaatttatcgatcactcgagtgaatgatccggaattagttgaccatgataatcaattttctaagacaaagccagctgattttgatcaagtcctgaatcaaacaacgcgggatgctaaagaagaaattgaaaagctaaagcaagtattaactgagaattaagagatggtccgaaagggccattttttgttagaaaaataatgaaaattaatgatttttttgaacaacatcagattgacttaaaggataaaagactattagtagccgcaagtgcgggaccggattccatggctttactagatatgctagttaatttgcaaaaacaactaagttttactgtttttgcggcacattttgatcatcaattgcgtgcggatagctcatatgaagtagaagttttgcaaaattattgtgctcaaaagaagatttgcctgtttaatggcaagtgggataaacatgatcagccccaaacgggaattgaggcagcggcgcgagaggcacgatatcattttttgactaatgttgctcatagcgagcgaatgaactatttattaactgcgcatcatggtgatgatttgctagaaaatattttgctcaaatttattcgctcgggaaatcctgaagagatgaatagtttgcaagatatcggctctatgcatggcgttgttttgcttagaccactattagcctatagtaagcaagaattactcgaatatgatcaagagcgtgaaattgactatgtaatagattcaactaatacggaggatgagactgttcgaaatcgactgcgtcatcatgtggtgccattattaaaagaggagaatcctaatttaattagtaatgcactgcgttttagtgaaaaaatgagtcaattgacggatttggcggatgagcagttgaatagtatgagaacggttgagccatttttgggtgcttggcgaattaaaacggacaacttaaatgatttatctacagaagaaaaaaatattttttggcaaaagataatctggcaaaaatatcatcgccgggtaaatgaaaatttgggcaattttgaggtgattgattatcaaggttatagttatttagttgaaaataagccacagaaaattgtgcagccatttagtatcgaactaaatcagcaatttaaattcaacggagcttattatttactaactactgataggcaagctgatttgaaagaaataggaagcttttggctggaaagggatgcacattttactgcgggaagtctagtacctgctagcaaattattgttgaaaaatggtcaacgagttaaggcgaaaaagaaattttcagaaaaggcaattccctttgccttgcgctcttgctgcattacaatttatgctgaaaatgaacctgtttttgtagaaaaatgttatcaaaaacaggactttatcacagatggtaaacattatttcctatacatttattaagaagtcttcaaaataggtgaaaatgttagtggttgcaagctaatttgtgatagaattttaaacgtataacttaaagactttgcggaggttttttatgaagaataaccggaatcggctactttcaaacggccttttctatatagttgtgttccttctgctcctatggggaatcaactgggcactcggcggctctaacaatagtggtagctcagagaatatcagttactcacaatttgttaaagatttgcgtcaaggcaaagttaaaaactttagtgttcaacctgctaatggtgtttacactgtttcaggtagttacaagactgcacaaacaacaaagaatcaatcaaataatagttttgatttctttagtaataattcaagtagaaaagtttcgcgcttctctactaccatgttacagaatgattctaccgtttctaacgtgcaaaacttggcacaaaaaagtaatgctcggatgacaactcaaggagaatcacaatctggcaattggatttcgaccattgtcatgcttgtgccaaccgttttgtttatcgtcatgctttggatgatgatgaaccaaggtggcgctggacgtggtggtggcggcggaataatgaatttcggtcgttcacacgtcaagccagaagatccttctaagaataaggttcgtttctctgacgtagccggtgaagaagaagaaaaacaagaattagtcgaagtagttgaatttttgaaagatccatctaagtacactaagttgggtgcaagaatcccatctggtgttttacttgagggtcctcccggtactggtaagactttgcttgctcgtgctgtagctggtgaagctaacgtgccattttattcaatctcaggttcagacttcgttgaaatgtttgtcggtgttggtgctagtcgtgtacgtgacctgtttaacaatgccaagaaaaatgcaccaagtattatctttatcgatgaaattgatgccattggtcgtcgtcgtggcaatggcaccggcggtggtaatgatgaacgtgaacagactttgaaccaattattggttgaaatggatggttttgaaggcgatgaaggtgttattgtcattgctgctactaaccgttcagacgtcttagacccagctttgcttcgtcctggtcgttttgaccgtaaggtattggtaggtcgtcctgacgttcgtggtcgtgaagctattttaaaggttcacgctaagaacaagccgcttgcacctgatgttgatttgaaggaagttgcccgtcaaactcctggctttgtaggtgcagatttggctaacgtcttgaatgaagccgcattagttgctgctcgtcgtaatggtactgagattactgcatcagatattgatgaagccgaagaccgtgtgattgccggtccagctaagaaggatcgtttgatttctgaaaaagaaagaagacgtgttgctttccacgaagctggtcactcaatctgtggtttggtcttaagcgactcacgtactgtacgtaaagttactatcgtacctcgtggccgtgctggtggttataacatcatgttgcctaaagatgatcaattcattttgactaaaaagcaattatttgaacaaattgttggtttgatgggtggtcgtgcaggtgaagaagcaaccattggtgataagtcaactggtgcttctaacgactttgaacaagctactcaaattgcgcatagcatggtagttaactatggtatgaccgaatccttaggtatggttgagcttgaaaaggaaggcgaaagcaatccttacggctttaagccatatagtgaagcaacttcagctaaaattgatgaagctgtaaagaagattttggatgaagctcatgctaaggcccttgagatcgttaaggacaacaaagaaaagcatagaatcattgccgaagctttgctcaagtatgaaaccttgaatgaaaagcaaattatggccttgtataagactggtaagatgcctgaaaaagacgaagatgaatatccgagtgaatcaaaggcttcaacttatgaagaagctaaggctgctgcagagaagcgcgaagttgaaaaggcagaaaaaaaggattcagatcaagcattagctgatcaagaaaaagataccttggagactccatctgaaaagaatcatgaagttgaagaaaataatcctgagaatcccgaaaaggatcaatcagaaaatgaaacttcaactcaagatactcctgcagatgatgagcataaagacaattaaataaaagtagggcctgtcacaggctctatttttttagaaaagaaggataaaaatgagtgattatttagtaaagtcaattgataagactaaaaacttacgcttgttaaccattaccgctaagggtgtagtgagtgaagcacaaaagcggcatgacttgtggtcagcttcagctgctgtgcttggtcgtactttagtaggatctcttttacttgctggtgcagaattgacagataaggaagaattgacagtccgtttattaggcaatggccctgttggtccaaccatcgtgacagctacctccgatttgaaggtaaagggttatgttaagaatccacatattgctttaccacctaagaaaaatggtcatattgatgtgaaaaaagctgttggacaaggatggtttgaagtaactaaggaccttggcttgaaggaaccatacacaggtcaggtaccaattgtttctggtgaaattgctgaagattttgcttactatttgactaagtcagaacaaattccgtcagctgttggtttgtcagtatttgttaatccaaataattcaatcggtgaagctggtggctttatgttgcaagcacttcctggtgctagtgatgctttgatcgatgaaacgattaagcgaattgatgcattgccagcactctcaacttcatttttggatggaatgacatcagaagacttagcacgtaaaatcttaggaaccgattgtaagattcttgaaaaagatgatgtagcctttaactgtgattgttctaaagaaaagtatgctggtattttggaaactttgaagagcgatcaattgaaagcaatgattaatgaagatcatggtgccgaacttacttgcaatttctgcggtaacaagtatcattattcagaagatgaattgaaagatattttagctaaaaagaacaaagataaagattattaaggcaaataaagccctaaggttttaaccagcggggcttttttgatatcataatagggtaattttgaaaggatgatttggtgaataacagctggaaaattcgcgatatcaccattccaaaccgagttgttgttgcgccgatggcgggagtttcaaactctgcattccgcgttgtctgtaaggaattcggagcggggctggttgtctgcgaaatgatttctgatcatgggatcatttatggaaataaaaagacattaagtatgatggatgttgatccgcgtgaacacccaatgagcattcaaatctttggcggaagcgaggaaactttgcttcaagctgctcaatatattgatcaacataccgatgcggatattattgatattaatatgggttgtcctgtacctaaagtaacaaagactgatgcaggttcgaagtggctacttgattcaaacaagatttatcagatggttcacgcagtagtgcagaacgttaaaaagccggtttctgttaaaatgagaacaggctgggataaaaagcatatttttgctgtagaaaatgctttagctgctcaagaagcaggcgcaagcatgattgcgatgcatggtagaacacgtaaacaaatgtatcaaggtgaagctgactgggaagtattacatgatgttgcccaggtgctagatgtgccttttgtggctaatggtgatattagaacacccgaattagctaaaaaagcattggatgagatcggttgtactgcagtaatggttggtcgcgctgctttaggtaacccttggattttgaaagatatggtacactatctggaaactggtgaaaaattgaagccgcaaactgttcgtgagaaggttgaaacggctaaacatcagcttcacgcacttgttaaaattcacggtgaaaagcgtgctgtaccagaatttcgtcagcaagccgcgtattatttaaagggaattccccgttcagcccgtactcgtgctaaaataaatgaggtctggacgcgtcaagaagtatatgatttgcttgataattttgttgacgagtatgaaaaaagagaagaagctcgtgctgcacgacgcgcgacaatgaacaaataaatggaggaaaagtaaattggcaaagaatgaaatgaatgaccaattaatagttcgtcgccagaagatggaagaattacgtgaaaacggaattgaaccatttggtcaaagaaaatttgatcgtcaagatttggcaagtactttagaagaaaagtatggcaacgaagataaagaagaattaaacgctgatatgcctaagaccaagattgcaggtcgtatgcttgcaaagcgtggtaagggtaaggttggttttgctgatctttacgaccgtactggtaagattcaaatctatgtacgtaaggatattgttggcgaagataactacaagatctttaagaaatctgatattggtgatttcttaggtattgagggtgaagttatgaagactgatactggagagcttactattagagcccttcacgtaactttcttatcaaaggctcttcgtccattaccagataagtaccatggtttaaaggacgttgaggcaatttatcgtcaacgttaccttgatttgattaccaaccatgatagttacatgcgttttgttcaccgtacccaaatcattcaagctattcgtgactacttaaatagtcaaaacttcttggaggttgaaactccagtacttcacaacattcctggtggtgctgaagctcgtccatttattactcaccacaacgctttggatattaacctttacatgagaattgctttggaacttccacttaagcgtttgattgttggtgatatggaacgtgtttacgaaatcggccgtgtattcagaaacgaaggtttggacactcaccacaacccagaatttactgaacttgaaagttacgcagcatactgggactaccatgatgttatggatgaagctgaaggtattatccgtgctgcagctaaggttgtttcagatgacggtaagatcacttaccaaggtactgacattgacttaggcaagccattccgtcgcgttcacatggttgacttgatcaaggaaaagactggcgttgacttctggaagccaatgactcttgaagaagcaactaagattgcggaagaccacgacatccacgttgaaaagttctggaaagttggtcacattattaacgccttctttgaaaagtactgtgaagaaactattgttgacccaaccttcgtttacggtcacccagtagaaatctcaccacttgctaagaagaatgctgacgatccaagatttactgatcgtttcgaaatttacatcatgggtgaagaatacggtaacgccttctcagaattgaacgatcctgacgaccaacgtgaacgtttcgaagctcaaatggaagaacgtgaagcaggtaacgacgaagctgacatgatcgatgaagattaccttcgtgctatggaatacggtatgccacctacaggtggtttgggtatcggtattgaccgtttggtaatgcttttgactgatgctccagctattcgtgatgttcttttgttcccaacaatgcgtccagaacgtgttgaaagcgtagaagctgaagttaaggctgatatggaaaagaagaataaagaaaataagtaatcttataaattaaaaaactcttatctatgttttaagcatggataagagtttgtgtttatatattttttaattgagaatcattttttcatcagagtattttttaggatcatttaaatcccattgctgatatctaacttcttgacacttaaagcctaattttttgtaaagctttttggccttagtattttctgcaaatacatcaagactaactggtcgactcatgtatctcaaagctgtcgttgctaaagcatacccgatacctttattttgatgaattggatctacataaatgtaatccagttcttggggatgaactgcaacgaagcccaatatgctgtcagcatcataagctacataaattttgcaggagaaaaaatcatccttatatggagctgtctctaaaggtatgaagtatttttccgcaccaccaattgttagctcttctttacgactaacgtcgtgaatgcgacatacttcagcataatcgtttggttgatattctctgatattaaattttggcatgtttttctcgcttcctaatattaagattttgatttagaaagcaatagtacgtaatctcatgtgaaatctcctttaattaaattgaagatattatagcaatttttttaattcggtacaataactaaaattaacttagttaaaaacagataagtaatattttttcaaaaagtatttgcaaagagaataatctttgctataataatttttgtatcgcggaagtagttcagtggtagaacatcaccttgccatggtgggggtcgcgggttcgaatcccgtcttccgctccaagatgaagagctcacgaatgtgagctttttttgtgcctaaaataaatttatcttttttgataaaaaggtcttgcaaagaaaaatgtatttgctataataatatctgttgtcgcggaagtagttcagtggtagaacatcaccttgccatggtgggggtcgcgggttcgaatcccgtcttccgctccaagatgaagagctcacgaatgtgagcttttttgtgcctaaaataaatttatcttttttgataaaaaggtcttgcaaagaaaaatgtatttgctataataatatctgttgttgcggaagtagttcagtggtagaacatcaccttgccatggtgggggtcgcgggttcgaatcccgtcttccgctccaagatagaaggctcaccaagtggtgagtctttttttacgggaaatagctcagtttggtagagcgctacgttcgggacgtagaggtcgccggttcaagtccgattttcccgatatacaagctatccgtttgggtagcttttttctttttgttataatatcttttaaaacttaaagggagattaaaaatgacggcaactactgaagaaaaatacaaattattagtggagcaagctagagctttgattgagggagaagatgattggattgctaatacagctaatttatctgctcttttgtttaattcgttaaatgatgtgaattttgcaggtgtttatcgctatgaaaatgatgaactgatattaggtccatttcaggggatgccagcatgtgttcatattcaaatgggaaaaggtgtttgtggtacggctgcacaagcaaaaacaacgcagattgttaaggatgtacatgaatttgctggtcacattgcttgtgatagtgcttcaaattcggaaatcgttgtcccaatttttaatcagggaaaactttggggcgtctttgattttgattcgaccaagctactaagcgtataattttttacggtaagttgaataaataattaaaaaagcccaagtcctttgaatttggacttgagctcaaacaaaaagaccagtagtctgatgttaagaacaaaaaacacattagaagctggtcttttatgaattcaattgtaactgaaatcgcaaatattataaagtctgaagataattatattaagcgtgaaagaaaaataatctgtttcttcttaaacctgattaaggaaatcatggccttggctttagctaaagttgatgatgaaatgattaccaaggttaaagcacagggctatcagattgataagaagaatgagcgctcaatcaatatggcttttggcgaagttaggtatgtcagaagaagatatgtctgcccaggcaaacaagcaaggtatcccttggatgaattaatgggctttgacaaatacaagcgctacagtattttagcagtcaaaaacatcttagaagtaagcagcgttgccacttatcgcaatactgctctagcagtcaattgcctgtctggctttaatattagccatatgcaggtgggcaatttggtaaaaatggccgggaaaaatattaaagcgggccaagaagcagattcaagatatgatgccgcaggcactaagaaaaaggtcccagttttgtatcttgaaggcgatggcgtggtgatcaaaggcactaaaagccggttggaatttcatcgctatcaggtctgtgaaggcattgtcaatataagcaagaaacgcagaaagcgaatcaatgccaaggaatttgtttctttaagccgacttgatgcgctgaacgaagccaaggagtacctggccaatacttatgatctttctgatactgtaattcttagcaacgccgatggcggtgctggatatgccaaaacagacttcgatgacattgtagggctatgcaagcgtcatgagcatttcttggatgtctttcacctaaataagaaaatcaaagaaaggctatattttgcgcctgacctgcaaggcaagctgatttctgctttggaatacaaatacagctatgacaaagttaaaactatcctaaccactgcagaaagccgactaattgatgaattgaataccgagctcaatcatgattatctggggcgcctaaggaattatattgatcgtcattgggacgatattaagccgtttaagaaacgaaaactgactgtgactaaagccattggctgctgcgagagcaaccaccgcaagtatacctaccgtgttaaggggcaaggcaagaaatggtcaaaatctggagcagaaggcatgcttaggatcttaagctgcatcaagaatcgagagctggaattttggcttagcagcgagtttgaagattcagaaataactgtattgactgaacaggaattaaaagcagcggcccgtgacagcttaaagaagcgtcatgaagttcatttaggcatccagcatggcgcattaaccgcacaggtagctggcaatagttatttaagcaagctaagcagaaatttaagtcatataaatatttaagaaattaaggttagactaatggtttaaaggctaccgcaaaaacattgacacttacaccaagctagctaattttgacgaaattgataaaaagtatttaactgaaatagcgaaagcaatttttgcgtaattattagaattggacataatgaagttgaagataagtcaaattgttttacttactgacaaaagaaaagtaaaataccataacgtattttaaagggtggtgtttgtatggaaaattcatatagtaagagcgttaatcaagtattgaaaattgcacgtgaacaagcacaaaattttcatcatcgcttgattggcacagaacatgttttattggctctagtaattgaaactgacggtgaagcaggaaaaatcttgcgttcatggggattaacaccaactgcagtacgtgaagaaattgaacgttatacaggttatggctctgcccctaaggcaagctacatggaaatgtcaccacgtttgagtttagcttgggattatgctagaagacgagctaatgacgatggagttaaggaagttaacactaatcatgttttgctgggaattactgcaagtgagcaggttttatcagcaatgattttgaaaaacttgaatgttgatattcctcgtctgcagcaggatgttgaagacagtttgagtcaagaccaagactttggtgattcagctaattggctgggtgatgataacacgacgactggtcaaaagaagcgcaagagcactactcctaacttagataaggtagcggttaatttaaatcaacgtgtgcgtaatggcgagattgatccggtgattggccgtgaccaagaaattaagcgtgtgattcaaattttgtctcgacggactaagaataatcctgtcttagttggtgaaccaggagttggtaagactgctgttgctgaagcgattgcaactgagattgtcaacaaaaaagtgccacaggatatgcttaagaaacgggtaatggccttaaatttaggtagtttagttgctgggactaagtatcgtggtgagtttgaagacagaatgaagaaaatcctgaacgaagtcaccaaggatggcaatgtcattctctttgttgatgaaatgcatactttaattggtgctggtggtgctgaaggtgcaattgatgcttctaatatcttgaagccttcgcttgctcgtggcgatattcaaatgattggtgcaactacttttaatgaatatcaaaagtacattgaaaaagatcaagctttggcacgtcgttttcaacaagtgcgcttaagtgagccttcaagagatgacactttgacaattatgcgtggcttgaagtcgaaatatgaaaagttccatcatgtgactatttctgatgagagcttgaaggatgcagttgatttgtcaacgcgctatatttcggatcgctttttgccagataaggcgattgacttagtagatgaagctagtgccgcagttaagattcgtaataacattagcaatgatgctgagctagaaaaagttaatgagcaaattaagaaactgattacgcaaaagaatatggctgccgctagtcaaaactttgttaaagctgctcaattgcaggatgagcagaacaacttagaaatgcaacgtgaagcaatggtagagaagttagaagacaaagttagtgctaaagctgtggttgagccagaagatatcgctaaagtagtttccaactggactggcgtccctgttacccagatggaacgcaatgaatcacggcagctagctaacctggaaaagattttacaccaacgtgttattgggcaagataaggctgtttcagcagttgcccgtgctattcgtcgtagtagaagcgggattaaagatgaacgtcgtccgattggttccttcttgttcctaggtccaactggtgttggtaagacagaactagctaagtcagttgcagcagcaatgtttggctcggaagacaatttgattaggctagatatgtctgaatatatggaccaaattgcttcaagcaaattaattggctcggcaccaggctatgtcggttatgaagaaggcggtcaattatctgaaaaggttcgtcgtcatccgtactcggttattttgcttgacgaagtagaaaaagctcatccagatgtctttaacttgcttttgcaggttttagatgaaggatttttgactgactccaaaggtagaaaagtcgactttagaaatacaattataatcatgacttctaatttaggttctcgttcgctctttgataataaggcagtcggcttcaatgcagataatgcagatccagccaaggcgagatcagctaaagttgaacaagcaatcaaacaattcttccgcccagaatttttaaacagaatcgatgaaactattatcttcgatgaactagataagaagcagctgcgcaatattgtaactttgttaacgcacaagctggtagttcgtttgcaaaagaagggtatcgaattgaagctatcacgggcagcactggatcagattgcacaagatggttatgatccagaaaatggtgctcgaccattgagaagagcaattcaaaatgatattgaagacaagattgccgagatgctgattgtaggcgaagttaagtcaggcgacactttgaaaattggtagtcagcatggacatttaaaatttgaagtagttaatccgaaaaaagaaactgtaaaagtcaagtgatattggtgctataccttgacaaaatgctgaaaatatcatataatttttgctgatttaaaaagactgagattcaggattttgctgatctattgtccagcaaaatgataagggacaaaaacgacaattgttgtttttgtcttttttatgcctaaaattgcagttttttgaatttgtaacagaaatgtaatatttgctttcttagacagaaaggatgtttttccttgttaaatggacacgtagtgaactacggtaaacatcgaactagacgtagcttctcccgcattaaggaagtattgaagttacctaacttaactgatgttcaaaccgaatcatataagtggtttcttgataaaggcattaaagaagtctttgatgacattatgccgattagcgatttctcaggtaagctttcattagaatatgttggctataaattgcaaaagccaaagtatacagttgatgaagcccgtaaccatgatgcaacttatgctgcaccaatgcacgttaccttgaaattgactaaccaagaaactggtgaaattaagactcaagatgttttctttggtgatttgccattaatgaccgaatcaggttcatttattgttaacggtgctgaaagagttatcgtttcacaattggtaagatcacctggtgtatattacactggcgattatgacaagaatggtcgtcaaatctttggtactactgttattcctaaccgtggtgcttggcttgaatatgaaaccgacgcaaagaacgtttcatttgttcgtgtagaccgtactcgtaaattgcctcttactgtattgattagagcaatgggtattggctctgacagtgacattattgatatgtttggtcaaagtgatactttgcaattcactttggacaaggatgttcataagaacccagctgactcacgtgtagctgaagccttaaaggatatctatgaaagacttcgtccaggtgaaccaaagactactgattcttcacgttcacttttgtatgcccgtttctttgatccacgtcgttacgatttagcacctgtaggtcgttacaagatcaataagaagctttcacttaagaaccgtttatacggtcaaactttagctgaaactttagctgatccagatactggggaaattgttgctaagaagggtactgtagttacccacgaagtaatggataagttagctccataccttgatcgtgatgactttaagatggtaacttaccaaccttcaaaggaaggcgtattaccagatcctattacagttcaagaaattaaggtttactcaaaggtagaccctgaacgtgaagttaaattaatgtcaaatggtcatattgctgataacgttaagcatttgactccagctgatgttttagcttcaatcaattacttctttgcattgcaagatgaaattggtactactgatgatatcgaccacttgggtaaccgtcgtattcgtcgtgttggtgaacttcttcaaaaccaatttagaattggtttggcacgtatggaacgtgttgttcgtgaaagaatgtcaatccaagatccttcaacagttactccacaacaattgatcaacattcgcccaattgttgcaagtattaaggaattctttggttcatcacaactttcacagtttatggatcaacataacccattaggtgaattgactcataaacgtcgtatgtcagccttagggcctggtggtttgacccgtgaccgtgctggttatgaagttcgtgacgttcactatactcactatggtcgtttgtgtcctatcgaaactccagaaggtcctaacattgggttgatcaactcacttgcttcatatgcgattattaataagtatggttttatcgaaaccccataccgtcgtgtttcttggaaggaccacaaggttactgataagatcgactatttgactgctgacgaagaagataattacattatcgctggtgccaacactccattgaatgatgatggttcatttaaggagaagttgatcttggctcgtcaaaaggaagataacgtcgaagtttctccagataagattgactacatggacgttattcctaagcaagttgtttctgtcgcttcagcatgtattccattccttgaaaacgatgactctaaccgtgctttgatgggtgccaaccagcaacgtcaggctgcaccattaattaatccgcatggttcacttgttggtactggtatggaataccgtgctgcacacgattcaggtgctgctttaatcgctaaggctgctggtgtagttgaatacgttgatgctaatgaaatccgtattagacgtgaagatggtactttggacaaatacacacttgaaaagtaccgtcgttcaaataactctaagtcatacaaccaaactcctaatgttaaattaggtgatcaggttgacaagagtgatgtaattgctaacggtccaactatggatcatggcgaacttgctttaggtcaaaacccattgattgccttcatgacttggaacatgtacaactatgaagatgccatcatgctttctgaacgattagttaaggatgatgtttatacttcaatcagtattgaagattatgaatcagaagctcgtgacactaagttaggtccagaagaaattactagagaacttcctaatattggtgaggatgctttgaaggatcttgatgctgatggtatcgttcgtgttggtgcagaagtccacgatggcgacattttggtaggtaaggtaactcctaagggtgtaactgaattatctgctgaagaaagattacttcacgctattttcggtgaaaaagctcgtgaagttcgtgatacttcacttcgtgtaccacacggtggtggcggtattgttcaagacgttaaggtttatactcgtgaagccggcgatgaactttcaccaggtgttaacacaatggttcgtgtttacatcgctcaaaagagaaagattcaagttggggacaagatgtctggtcgtcacggtaacaagggtactgttgctgcagttgttccagaagaagacatgccatacttaccagatggtactccagtagatatttgtttaaacccaatgggtgttccatcacgtatgaacatcggacagcttcttgaattgcacttaggtgcagctgctcgtcaattgggcattcacgttgcaacaccagtatttgatggtgctgacgaaaatgacgtttgggacacagttcgtcaagcaggtgttgataaagatggtaagaccgttgtttatgatggtcgtaccggtgaaccattccacaaccgtgtatctgtaggtgttatgcactacttgaagttgacccacatggttgacgacaagatccacgcacgttcaattgggccttactcattggttactcaacaaccacttggtggtaaagcacaatttggtggtcagcgttttggtgaaatggaagtttgggcccttgaagcttatggtgctgcttacacattgcaagagattttgacttacaagtcagatgacgttgttggtcgtgtaaaggcatatgaagctattgttaagggtgaaaagattcctaagccaggtgttccagaatcattccgtgttcttgttaaggaacttcaatcattaggtttggatatccgtgttcttgatatgaaccataatgaaattgaacttcgtgatatggatgaagactcaagtgaacacttgaacatcgatactttgtcacggatggcagaagagcaagaaaagaagaagttagccgaagaaactggaaaatcagaagataaagacagtaaagaaaatgcagataagccggtagctcctgcagatgagtctgacgataaagtttctaaatagtaggaggttaaacttttgatcgacgtaaataagtttgaaagtatgcaaattggtcttgcatcacctaacaagatcagaagctggtcatatggtgaagttaaaaagccagagaccatcaactaccgtactttaaagcctgaaaaagatggcttatttgatgagagaatttttggaccaacaaaagattggtcatgtgcttgtggtaagtacaagggcgttagataccgtggtatcgtttgtgaccgttgtggtgttgaagttacttcttcaaaggtaagaagagaacgtatgggtcatattgaattggctgcacctgtaactcacatttggtactttaagggtatcccatcaagaatgggattagttttggacatttctccaagattacttgaagaagttatttactttgctgcatacattgtaattgatccaggtgatactgaccttgaacctaagcaattattaactgaagctgaataccgtgaacaaaaagctaagtacggtaaccgttttgaagctaagatgggtgctgaagctgttcgcgatttgcttaagaaagttgaccttgataaagaagttaaggatttgaagaaagaacttcaaactgccactggtcaaaaacgtacgcgtgcaattagacggttagatatcttggatgccttcaagaattcaggtaacaagcctgaatggatggtaatggatgccgttccagtaattccaccagatcttcgtccaatggttcaacttgaaggtggccgttttgcaacttcagatttgaacgatttgtacagacgtgtaatcaaccgtaacaaccgtttgaagagattgcttgatttgaacgcacctaatattattgttcaaaacgaaaagcgtatgcttcaagaagctgttgatgctttaattgataacggtcgtcgtggtcgtccagttgttggaccaggtaaccgtccattgaagtcactttcacatatgcttaagggtaagcaaggacgtttccgtcaaaacttgcttggtaagcgtgttgactactctggtcgttcagttatcgatgtttcaccaaaattgaaattctatcaatgtggtgtgccacgtccaatggctttggaattgttcaagccatttgtaatgcatgaattagttaaacgtggaattgcatcaaacatcaagaatgctaagcgtaagattgaccgtgaagatgacgatatctgggatgtacttgaagatgtgattaaggaacgtccagttcttttaaaccgtgcacctactcttcaccgtttgagtattcaagcctttgagccaatcttggtaccaggtaagtcaattagacttcacccattagcttgtgaagcctacaatgccgacttcgatggtgaccagatggctattcacgtaccactttctgatgaagctgttgctgaatcaagattgttaatgttggctgctcaccacattttggctcctaaggatggtaagccaattgttactccatcacaggatatcgttttgggtaactactggttaactcaggccgaacgtggtcgtgaaggtgaaggtatgatcttcagctcaccagcagaagctgctgtagcttacgaaaatggcgatattcactaccataccattattggtatgtctgcagatgctatgcttaaaaagccatggcctaagggacatgaacacggcatctttattaccacttatggtaagattgtcttcaatcaattgttcccagatgattacttctatatcaatgaaccaactgaagagaacttgaacaatccgttggatgctaagtacttcttaggtgaaggcgaagagattgataagaagatcgatgaagtaggcgatgatttaatcgctagtccatttaagggaagcttcttgtcagattctattgctactatttacaagtattacaaggttcaaagaacttcagaatacttggatgatttgaagaagttaggctacattagctcaactacttcaggtattactattggtatgactgacgttccagaaatccaagataaggatgaaaaggtagccaaggcacgtaaacaagttgatgttgtttctaagcaatttagacgtggtttgattactgaacaagaacgtcacgaccgagtaattagtatttggaatgcatgtaaggacaagatccaaaacgaaattgcacaaattcacgcacctcgtaatccaatttcaatcatggcagactcaggtgcccgtggtaacatttctaactttactcagttagccggtatgcgtggtttgatggccactcctaacggtggtttgttcgaaattcctgttacttcaaactttaaggaaggtttgtcagtattggaattgttcatgtctactcacggtgctcgtaagggtatgactgatactgcattgaagactgctcagtcaggttacttgactcgtcgtttggttgatgttgctcaggacgttattattcgtgatgacgattgtggtactgatcgtggtattacagttagtgccatcatggaaggtgacgaaatgatcgaaccattatttgaccgtttggttggtcgtttcactgctgagactgttaaagatcctgaaactggcgaaactattgtcggcagagatgtcatgatggatgaaaacatggcacacaagatttgtgatgcaggtgtaactcacgttaagattcgttcaattcttacctgtgatactcctcacggcgtatgtcgcaagtgttacggtatgaaccttgctactggtgaagaagttgaagttggtgaagcagttggtactgttgctgctcaatcaattggtgaaccaggtactcagcttactttgagaactttccacaacggtggtgttgccggtgctgaagatatcactcaaggtttgcctcgtgtgcaagaattgtttgaagcacgtaaccctaagggtcgtgcaaccatttctgaagttgatggtgtaattgattcaattcaagaaaacccagcagaacatactcgtgaaattactgttaagggtaagattgatactagaagctacagtgttccttatacagcttcagttgctgttagcgaaggtgactacgttcatcgtggtgacaagttaactcttggttctgttgatcctaaggaattgattcaagttactgatacattaactactgaaaagtacatcttagctgaagttcaaaaggcttatagaatgcagggtgtagacattgccgacaagcacgttgaagtgttaactcgtcaaatgctgcaaaaggttcgtgtccttgatccaggtgaaactgacatcttgccaggtgaagttatggatattggtcaatttagagaccgcaacaaggaagttattatttctggtggtattccagcaactgctcaaagcgttatcttgggtattactaaggctgctttggaaactaacagtttcttgtcagctgcttcattccaggaaaccacacgtgttcttactgatgcatctattagaggtaagaatgatccacttcttggacttaaggaaaacgttattattggtaaaattattccagctggtactggtatgcctgtataccgcagcatggaacctgaagctgacgttaagaagccagattcagtatactcaattgctgatattgaaaagcaaatgaaagaaaaggataaagctaagcaagactaagctttattgaaaataaataagcatttccaatcttttaagagcgggaatgcttatttttttgtctaaaaaattaattgggttagtactaatcctaggaaaatatatggaataaatggatagcgatggttaataggagttttttcaataagaaaaattgcaattaccaagattgaagcaaatagaaaaactaaattggcaaatgatggggtgaagtagcaagcgataattaagtaaattaataaatcgcctagccccatttttctttgcattatgctatagctaaaaattcctagcaataatgtaaaagagatccagtcgattaatgtaaaagctgcaaattggttgaataaaatcgcaacgctaatggctggaattagtaggagaagatcaaattcttgcttttgataatcagagattgcaacgactaaaagcgaaaaaagcaaaatagcggtaataatgtcctgtgtcttactaaaatcgagtaaacaaaaggcaaagccgccaattaattcaaataaaaataattcaactggaatttgttgataacaataacgacattttccttgaagaaaaagataagataataatggaatttcatccaaaattgataattcaaggtgacagttgttgcactgagaacgtgagtaaataaaatttttatcattccagtgctcgtaaactactgctgcgtgagaagccaagcaacttccaattataaagttagtaaaaataaataagtatttcaaaaaaacacctccactatttattacgcaaaaatagccgatttttctttttttattttgaaaaagtttgctttctgcttaaaaccgagtacaatagtctttgtatgttttgaacagtctattcgtgagtaaaaaagaaactcccggatgtgtgaacaaaatagtattttaggaggaaaaattaatgccaaccattaatcaattggtaagaaaaggccgtcattcaaaggtcactaagtcaaagtcacctgctttgaattacagctacaacagtatgaagaaggaatcagtattcaacccagctccacaaatgcgtggtgttgcaactcgtgttggtactatgactccaaagaagcctaactcagctttacgtaagtacgctcgtgttcgtctttcaaacttgatcgaagttactgcttacattccaggtgaaggccacaacttgcaagaacactcagttgtattaatccgtggtggtcgtgtaaaggaccttcctggtgtacgttatcacatcgttcgtggtgcccttgatactgctggtgttgatggcagaaagcaaagccgttctaagtacggtactaagaaagattaaaggaggagttaaataatgcctagaaaaggtcacgtaactaagagagacgttttagcagatccagtttacaactcaaagcttgttactaagttgatcaaccacttaatggtcgatggtaagagagctaaggcatcttcaatcctttacgatgctttcaacattgttcaagacaagactggtaaggaaccacttgatgtatttgaagaagctatgaacaacgttatgccagttttggaagttagagctcgtcgtatcggtggttcaaactaccaaatcccagttgaagtacgtcctgaaagaagaactactttaggtttaagatggcttgtttcatacgctcgtttacgtaacgaacacactatggatgaacgtttagctaacgaaattatcgatgcttcaaacaacactggttcagcagttaagaagcgtgaagatgttcaccgtatggctgaagctaaccgtgcatttgcacactaccgcttctaatttgttcgttttaatttaaggagagaataatttatggctaacaagcgtgaatttccattagcaaagacacgtaacatcggtattatggcccacatcgatgcgggtaagactactactactgaacgtatcctttactacactggtaagatccacaaaattggtgaaactcacgaaggtgattcacaaatggactggatggatgaagaaaaggaacgtggtatcaccattacttctgcagctactactgcacaatggaaagaccacagaattaacatcatcgacaccccaggacacgttgacttcactatcgaagtagaacgttcacttcgtgttcttgatggtgccgtaactgttcttgatgcccaagctggtgttgaaccacaaactgaaaacgtatggcgtcaagctgaaacttacggtgttcctcgtattgttttcgttaacaagatggataagatcggtgctgacttcgataagtcagttaagtcattgcacgaacgtttaaacgctaatgcccatgctgttcaaatgccaattggttcagctgacacttttgaaggtgttatcgacttaatcaacatggttgccgacatctacgacgaagataagcttggttctaagtgggatactgttccagttcctgacgaatacaaggaagaagctgaagcacgtcgtaacgacttaattgaagccgtagccgatgttgatgacggcatcatggaaaaattccttggcggtgaagaaatttctaacgatgaattaaaggcagctatccgtaaagctactttggacttgaagttcttcccagtttacgctggctcagccttcaagaacaagggtgttcaaatgatgcttgacggtgttattgactacttgccatcaccacttgacgttaagccttacgttgctcacaatcctaagactggtgatgaagttgaacttatggctgacgataagaagccatttgcagctcttgcatttaagattgctactgacccattcgtaggtcgtttgactttcatccgtgtttacaccggttctcttgaatcaggttcatacgtattgaacgcttcaaagaattcacgtgaacgtgtaggtcgtttgcttcaaatgcacgctaactcacgtactgaaattccagaagtattctcaggtgacatcgctggtgctatcggtttgaagaacaccactactggtgactcattaactgacccagatcacccacttattttggaaagcttgaaagttccagatccagttatccaagtatcagttgaacctaagtcaaaggctgaccgtgataagatggacgttgctttgcaaaagcttactgaagaagacccaactttccgtgctgaaactaacccagaaactggtcaaaccttgatttcaggtatgggtgaacttcaccttgacatcatggttgaacgtatgagacgtgaatttaacgttgatgctaagattggtgaaccacaagttgcttaccgtgaaaccttcaccaaggaagctaaggcacaaggtaagtttgttcgtcaatcaggtggtaaaggtcaatacggtgacgtttggattgactttactcctaacgaagaaggtaagggttacgaattcgaagatgccatcgttggtggtgttgttcctcgtgaattcattccttcagttgaccaaggtttacaagaagctatgaagaatggtgttcttgcaggttacccattgatcgacgttaaggctaagctttacgatggtagttatcacgaagtcgactcatcagaagctgccttcaaggttgctgcttcacttgctttgaagaatgctgcttcaaaggctggcgcagttatcttggaaccaattatgaaggttcaagtaactactccagaagaatacttaggtgatgttatgggttcaatcactgctcgtcgtggtaccatggaaggtatggaagacagagccggtgctaagatcatcaactcatttgttccactttcagaaatgtttggttacgcaactactttgcgttcatcaactcagggtcgtggtacatttactatggtatttgatcactactcaccaacacctaaatcaattcaagctgacatcattaagaagcgcggcggagatgctgaatagcttccgttaagaactgattaatgcagttagcttaattgaaaacaatttcatataaaaaagagttatcatttttatttcaatgtcattaagttaagacattgacaattaatattagacttttaaagcactgatttaacatttaattggttaaattggtgcttttttcgtacaacaaataaggcatagcacagattctgcttttttaagctacgcgatataaataatatacagctgatttgggcttaatatttctcttgtccttgcggcctggtctaattggaatggtataatagctgatctgaataaggatccgttcaaaatcttgcgttaaagaagaagccaaatacatgctctgaataatcaagcatgattgcttgaaattgatggcatattgatacttgcaatgcttttgcggaatataggcctgtgcatcaatttgactgattgcattaaacataatcatatgggcataaatttccatttcaataaatttatcttgtttggaatggaactgtacactgcctaaagaatacttcaatttcttgaaggaggtctcaataccccaacgcagatgataaagctctttaattctttttagcggataattttttcgatcaagattggttagcacaacttcccattcttctttgcctgatttggcatcattaattctaaatttgcaggctcgaaattttattgtgcataactcgccaaaatcccagcttagatcctgggtatttttagagcgatacttaatatattggcgataatgatgctggacatggtgaatattctcactggctttatgcgtgatgtagtaatagttagaagtagttaccaggcaggaaatctcacgatcacattcttgatcaggcaatgtcgttatttctttaactccgccttgtccagccttagttcgtattatgtaatgacagttaggcaggcgattgcagttttcaatcatattgaaactagtgtagccacgatccattgttacaatatatggaccacaattcaaagctttaagcatttgaacagccgctttgcgttcatccatttctgatttaggctgaaaaatacaatcctggtaggtattattcaatagatcatataaggcattaacgtgaatttgacaatagggtttctttttatgagaagaagcttgtacaatgttattcgatttcggattccagatttgattaaagtcagagccatcaatggcaaacaaacggtagtgatgatcaaaaagttgaatattaaatagattttgattaaaaacagtcagaatatgtttaaaacaagcaggagaaagctggcttttgcgttgaacataggcagaagtactaactactttatcgttctttttagttgcatcttcgccaaaagctctaaagagttcactgtttaaattctgaccttgcatgttaattgtagttttaaggactgtcgctgcatctaaagtgcgtttcctggtaaaagcatgaggattattaataaaatcgtgaatatgatccccagtattattgataatttgatcaagacgttctagaatattcttatgaagggctttcataattaacaccatctttctggcaataattttgaaggtttaaaatatataatatataagataggcgaaaaggctggtcttttcgcctttattttatacaaaaaaagagatcgaatccaaatgattcgatctctaaaaaagcacccttaattgtcaatgtcttaacttaatgacattgcatttttattttgataactctttttttgtaaataaatttaagaaaaaagtcgtaaacccttgatatttaaggagggacaaagtacaatagtttttgtgcttatgggacagtgtgcccttaagtgtgaaaatcgttgtaaagcgttgacgcaaaaggttgcggcacgccaggctgcattgccacagtggcgtgcggggaatttttgccgagcgagtcatcttttaaagaagacgttaaggaggtaatttaatggcaagtcaaacaattcgtattagacttaagtcttacgaacatggtattctcgatgaatcagctgctaagatcgtagctactgcaaagagaactggtgctgaaatttcaggtccagttcctcttccaacagaaagaactttattcacagttcttcgttcaccacacaagaacaaggactcacgtgaacaattcgaaatgcgcactcacaagcgtttaatcgatattttgaatccaacaccaaagactgttgattcattaatgaagcttgatcttccaagcggtgtagacatcgaaattaaactgtaatttaaatagaaagaggtgtaaacatgaccaaaggaatcttaggaagaaaagttggtatgactcaaatctttactaaagatggtgtccttgttcctgtaactgttgttgaagcaactcctaacgttgttatgcaagttaagactgttgaatcagacggttacgaagcagttcaattaggttaccaagacaagcgtgaagttttgagcaacaaaccagaaaaaggtcatgctgataaagcaaagacttcgcctaagcgcttcattcgggaaatccgcggtgttgagcttaaggactatgaagttggctcagaagttactgtggatacatttaaggaaggtgacgttgtaaacgttactggtacttcaagaggtcatggataccaaggtaacatcaagcgttggggccaatcaagaggaccagaaactcacggttcaagataccacagaattcctggttcaatgggttccatcattaaccgtgtaccaaagggcaagcgcttgccaggtcacatgggtgtgaagaaagttaccattgaaaacttagtaattgaaaaagttgttgcagacaagaacgtattgatgattaagggtaacgtcccaggtgctaagaactcattaatcgttgttaagactgcttctaaagctgtaaaggctgataaataggaaggaggactagaatggctaatttaaaagttatggatcaaaacggtaaagactctggtgaagttactttaaacgataaggtttttggtattgaaccaaatgaaagtgtcgtttttgaagcaattattagacaaagagccggcaagcgtcaaggtacctcaaaggttaagaatagatctgctgttcgcggcggtggtaagaagccttggagacaaaagggtactggtcgtgctcgtcaaggttctatcagagctccacaatggcgcggtggtggtacagtctttggcccaactccacgttcatacgcatacactatgccaagaaagcaacgtcgtttggctattaagtcagttctttcccaaaagttgattgacaatgatttaattgttttagataagttgactatgtcagctcctaagactaaggaattagtatcaatgttaaacggcttaaatgctgacggtaaagttttaattgtttcagatgataacaatgtacaactttccgcaagaaacttgactaaggttaaggttgttccagttaatggcttaaacgttgaagatgctgttaactatggcaagttgatcttagatcaagatgctgttaagaagatcgaggaggttttggcttaatggacgcacgcgatatcattttaagacctgtcattactgaaaagtccacgaacttaatggatgataagaagtacacattcgacgtgcttttaactgcaaccaagacacaagttcgcaatgctgttgaagaaatcttcgatgttaaagttaagaacgtaaacattatgaacgttcgcggcaaggacaagcgagtaggtcgttacactggtaagaccgctcgtcgtagaaaggctatcgttactttaactaacgattcaaacgacatcaagattttccaagacgataacacagaagacaacaagtaataggaggtcagtcaattggctattaagatttacaagccaaccacgaatggtcgtcgtcatatgacttcttccgactttgctgagatcactaagacaaagcctgaaaagactttacttgaatctcaatcacatactgcaggtcgtaactcatatggtcatatcactgtaagacaccgtggtggtggtcacaaacaaaaataccgtatcatcgactttaagcgtaacaaggacaacgcaaaggcagttgtaaaggctatcgaatacgatccaaacagaactgctaacattgctttgcttcactacactgatggtatcaaagcttacatcttagctcctaagggcttaaaagttggcgatgtagttgaatcaggtgattcagttgacattaagccaggtaacgctttggaattaaagaatatcccaactggtacttcaattcacaatatcgaattaatgccaggcaagggtggccaactcgtaagaagtgctggtgcttcagctcaagttttaggtgctgatggtgattacactttagtaagattacaaagtggtgaagttcgtaagattttgtcatcatgccgtgcaactatcggtactgttggtaatgaacaacactcattgattcaattaggtaaagctggtcgtaagcgttggttaggcaagcgtccacaatcacgtggttctgtaatgaaccctaacgatcacccacatggtggtggtgaaggtaaggctccagttggtcgtcctcaacctatgactccatggggtaagaaggcacgtggtattaagactagagataccaagaaggccagcgagaagttaatcattcgtcaccgtaaaggtagcaagtagtagaaggagggttaattaatgagccgtagtattaaaaaaggtccttttgctgatgcatcattgttaaagaaggttgatgcacaagcagatgcagataagaagcaagttattaagacttggtcacgtcgttcaactattttcccttcctttgtaggtttgactatagctgtttacgatggtagaaagcatgtcccagtatatgtaactgaagacatggttggtcataagttaggtgaatttgttccaacaagaactttccacggacacaaatccactgatgataaagccacaacacaagcttagaggaaggagaaacatctaaatggcagaacaaattagttcagctaaggctgaagcaagaactgttcgcatcgctccaagaaaagctcgtttagtcgttgacttaattcgtggcaagagcgttgctgaagcattagcaatcttggaatttacgcctagagctgcttccccaatcgttgaaaaagttttacgttcagctattgctaacgcagaacataactacgatcttgaaagtgcaaacctttacgtatcagaagcttacgtaaatgaaggtgcaactttgaagagattccgcccacgtgctaagggtatggcttctccaattaacaagagaaccagtcacgtagttgtagtagtttcagaaaagaacgattaagggaggtatattaatgggtcaaaagattaacccaaacggttttcgtctcggtgttatccgtgattgggaatcaaaatggtatgctgacaagggatacaaagaaactttaaatgaagaccttcaaatcagaaaatttatttcagaaaagttgaaggatgcctcagtatctactgttgaaattgaacgtgcagctaacagaattaacatttcaattcatactgctaagccaggtatggtaattggtaaaggtggttctgaagttgaagctttgagaaaacaattaaatgctttaactggtaagcaagttcacattaatattgttgaaattaagaaaccagatcttgatgctaagttagtagcagatagtattgctcgtcaacttgaagctcgtattgctttcagacgtgctatgcgtcaagctactcaaagagctatgcgtgctggtgccaagggtattaaggttcaaacttcaggtcgtttgaacggtgccgatatggcaagaagagaatggcacacagaaggtcgtgttccattacaaactttgagagctgatattgattacgcttgggtaaatgccttcactacttatggtgaaattggtgttcaagtttggatcaaccgtggcgaaatcttacctactcgtaagaataagccagcttcaaagccagcgaagggaggaaatagataatgcctttagtaccaaagcgagtaaaacaccgtcgtgaattccgtggtaagatgcgtggtgctgctaagggtggtaaatatattgcctttggtgaatatggtcttgaagccctcgaatcacattggattactaaccgtcaaatcgaagcagctcgtgttgctatgactcgttacatgaaacgtggcggtaaggtttggatcagaattttccctcaaaagtcatacactgctaaaggtgttggtgtacgtatgggttcaggtaaaggtgcaccagcaggttgggtagctgtagttaagagagaaaagattatgttcgaaattggtggtgttgatgaagcaactgctcgtgaagctttacgtcttgcttcaactaagttaccaattaagactaagtttgtaactagaagttcggaagtaggtggcgaatctaatgaaggctaaagatatcagagcattaaccactgatgaaatgttagaaaaagaaaagcaatacaaagaagaactcttcaatttgcgtttccaacaagcaacgggtcaattagaaaataccgctcgcttgagcaaagtccgcaagaatatcgccagaatcaagactattctgagcgaaaaagcgttagaaaacaattaatggaagggagctattaacttgagcgaaacaaacgaaagaaatcgtcgtcacgtataccaaggtcgtgtagtttctgataagatggacaagactatcgttgtagttgttgacacttacaagaaccaccctgtttacaacaagcgtattagatattcaaagaagtactacgcacaagacgaaaataacgaagctaaagttggcgatactgtacgtatcatggaaacccgtccattatctcgtaagaagcgcttccgtttagtaaagattgttaagaaatctgtttaatttgcggatttagtgaggggaggattacacagtgattcaaaacgaatcccgtttaaaggttgctgataactctggtgccagagaacttttagttattagagtcttaggtggttcaaagcgtaagaccggtaacattggtgacatcgtagtatgtactgttaaacaagcaacaccaggtggcgttgtcaaaaaaggcgacgttgtaaaagctgttattgttagaactaaatcaggtgcacgtcgtgaagatggttcatacatcaagttcgacgaaaatgctggcgtaattatcaacgcagacaagagcccacgtggtactcgtatctttgggccagttgcacgtgagttacgtgagaacgactttatgaagatcgtctctcttgctcctgaagtcttataattgatagtgaggtgcactgatgttcgttaaaactggtgacaaagtaaaagttattgccggaaaagataaaggtaaagaaggtactgttctttctgttaacgttaagaaaaaccgtgtagtggttaagggcgttaacaagattaagaagcaccaaaagccttcacaaagcaatgctaatggtggtgtagttgaatcagaaggttcaattcacgcatcaaacgttaaagtaattagtagtaaaaaagaagataagtagaagggaggacacacatggcaagttatttagctaaggaatacaacgaaaaggtagctcctgcattagaagaaaagtttaactacaagtcatctatgcaagtacctaagatcgacaagattgttttaaacatgggtgttggtgatgcagtttctaacgccaagaacttagatgaagcagttgaagaattaactttgatctcaggtcaaaagccattaatcactaaggccaagaaatcaatcgctaacttccgtttacgtgaaggtatgtctatcggtgctaaggtaactcttagaggcgacagaatgtacgatttcttgtacaagttaatcaatgtttctcttccacgtgttcgtgacttccgtggtgtatcaactcgttcatttgatggtcgtggtaactacactttaggtattaaagaacaattgattttcccagaaatcgattttgataaggtaaaccgcactagaggtttagatattgttatcgtaactactgccaacactgatgaagaagctcgtgaacttttgactcaatttggtatgccgtttgcaagatagtggaggacattaatggctaaaacatcacaaaaaatcagaaatcgtcgtcctgctaagttctcttcacgcgaatatacacgttgcgagagatgtggtcgtccacactccgtataccgtaaattcggattatgccgtatttgcttaaaggaattagcacacaagggtcaaatccctggtcttaaaaaggctagttggtagtatacggttaggaggatagcttaaatggtcatgacagatccaatcgcagattacttgactagaatcagaaatgccaacatggcaaaacacgattcagttgaaattcctgcatcaaacattaaaaagtctatttcagaaattttgaaacgtgaaggcttcatccgtgattacgaagttgcagatgataacaagcaaggcgttatcaaggtattcttgaaatatggtccaaatggagaacgtgttatctcaggtttgaagcgtatttctaagccaggtcttagaaactacgttggcgctgaagacttacctaaagttcttaatggcttaggcattgccatcgtttctacttctgctggtgttattaccgacaaggaagcaagacaaaagaacgttggcggcgaagtaattgcctacatttggtaatactgacagaaaggagaacaatcaatgagccgaatcggtttaaagactattgaagtccctgacagtgtcactgttaccaaggaaggcgacaatattactgttaagggcccaaagggtgaattaactagatacttcgatccaaagattaagtttgaacaaaaagatggtgaaattaacttttcacgttcaagcgaaagcgacaaagcacttcacggtactgaaagagctaacttagcttcaatgatcgaaggtgtagttgacggttataagaagactttgaagttaatcggtgttggttaccgtgcacaagcacaaggcaacaagattactttaaatgttggttattcacacccagttgtattgactgcaccagaaggtgtttctgtaaaggcaacttcagcaactgatgtagaagttgaaggtgtttcaaagcaagatgttggtcaatttgcagctgaaatccgtgccgtacgtccaccagaaccttataagggtaaaggtattcgttatgttgatgaatacgtacgtcgcaaggaaggtaagactggtaagtaataagtagttatttttgaggtgaaattgtgatttctaaaccagataaaaacaagttacgcttaaagcgtcatagacgtattcgtggaaaaatttctggtactgctgagcgcccacgcttaagcatttttcgttcaaataaaaacatctacgctcaattaattgatgacgtagcgggtgttacgcttgcaagcgcctcaactttggatgaaaatgtatcagatgcaactaaagtagaacaagctgctgctgtaggtaaggcaattgctgaagctgcaaaggcaaaaaacatttctactgttgtattcgacagaagtggttacttataccacggccgtgttcaagcattagctgatgctgctcgtgaaaacggattagatttctaggaaaggagaattaacacatggcaaaccgcaatgattctcgtaacaatcgcagaaacaaagacgatatcgaagatcaattagtcgctgtcaaccgtattactaaggttgttaaaggtggccgtcgcatgagatttgctgctcttgttgttgttggcgacaagaaaggccgtgtaggttttggtactggtaaagctcaagaagtcccagaagcaatccgtaaggctgtagaagacggtaagaagaaaatgatcaatgtacctaaagttggtactactattcctcatgaagttattggtcactacggttcaggtaacattttattgaaacctgctgaagctggttctggtgttgctgctggtggtgccgtacgtatcgttatggatatggctggtatctcagacgtaacttcaaagtcacttggttcaaacactccaattaacgttgttcgtgcaactatcgatggtttgaagaagcttagaactagtgaagaagttgcaaaacttcgtcaacctgaaagagcttaagattagggagatcatagatgactgatttaaagattactttaattagaagtgttgctcaccgtctacctcaacaaagaaagatcgttaaagctcttggtttaggtagagtggatagtactgttgttcttccagacaacgctgctactcgtggtgcattattaaagattgctcacttaatctctgttgaagagattaacaaatagaatatcaaggaggtgccaaattaatgaagcttcatgaattacattctgctgaaggctcacgtcgcaatagaaaacgtgttggtcgtggtacttcaagtggttacggtaaaacttcaggccgtggtcaaaagggtcaattagctcgtcaaggcggtcatactcgtttaggttttgaaggtggtcaaatgccattattcagaactatgcctaagcgtggttttaagaacattaaccgcaaggaatatgcaattgtaaacttagatgatttaaacaagttcgaagacggcagtgaagtaactgtagaatcacttaaagataatggcttagtaaagaaagaattgtcaggtgttaagttacttggcaagggcgaattaaaagttaagttaactgtaaaggttaataaagtttccgcatctgctaagcaagcagttgaagccgctggcggaactgttgaggtgatctaatgttttcgaccttgaagaacgccttcaaagataaagaaattagaaataagctctatttcacgctctttattcttttgctgtatcggatcagcgcaaacattaccgttcccggtgttaatgcgaaggcgatcacgcaggttgcgcaaactggtttagttccaatgctggatactgtatctggtggtggactagataactattcaatattttctttgggtgtttctccttatattacggctcagattgttatccagctgctacagatggatattgttcctacgttagtagaatggggaaaacaaggtgaagtaggtcgacgtaaaacaaatcaagtaactagatatttagcattagttgttgcttttatccagagtattggtattacgttaggctttaacgctttaactcaaatgggtttggtaaagaatcaaacaccacagacttatatagaaattgctattattatgactgctggaactatgttattaacatggttgggtgatgaaatcactgataagggtctaggtaatggtatctcagtaattatttttgctggtattattgcaagactaccaagtggtctatggcaaatttataaggaagaaattattaataatagtgctagtgatcgttggcaaggcattttgttcttcatcgcggttatagttgcaatccttatcgtaactcaatttgttacatgggttgaacaagctgatcgtcgtattccaattcaatatacgagaagagcgacgatgagtggttctgaaagttttctaccattaaaggttaatgtatctggagttattccggttatttttgccagttcatttattgttacaccggcaacgattttaatggcctttcaaagaacccagggcgatcaacaatggtttaaagtaatgaaccaaatctttagcttacaaactactcctggggtaattatctacactcttttaattatcttatttacattcttctacgctttcgtacaggtcaaccctgagaagctagcagaaaacttacaaaagcagggtgcttatattcctagtgtatggccaggaaaagatactcaggattatatttcaaagatgttgatgaaattatcaacagtaggttcattattcttgggcttagttgctttactgcctcaattggctactaacttttggaatctcccaagttccattggtttaggaggaacaagtcttttaattgtgattggggttgttctcgagttatctcgtcaaattaacggcttgttaatgaagagagaatatgttggattcatcagataggaacggataaatgattaacttaattcttttagggttaccaggtgctggtaaaggtacagcatcagagcgaatcgttgataaatatcacttaactcatatttcaactggggatatgtttagggaagcaatggctaacaagacgaaggttggtcttgaagctaagagttatatcgataagggtaatctagtacccgatgaagttaccgcaaagttggttgaggaacgtttaagtcaacctgatattaaagaaggttttatcttagatggttttccaagaaccactgtacaagcagaacttttagatggtattacaaaacgtttggagaaacctttaacaaatgtcattgcgcttgaagttgacgaagacactttgattaagcgtttatcagcaagatacatgtgtaaaaattgtggaactacttacaacaagctttccaagcagccaaaagttgagggcacttgtgatcgctgtggtggccatgaattttatcaacgtgaagatgataaaccagaagttgttaagaatcgtcttgaagttaatgaaaagatgaatgcacctttgaaggacttttatcagaagaaaggcttgctcactgtaattaatggtgaacaaactccagaaaaagtctttgaagatattgatgcggtattgagtaataatcaatagaagaaaaatttgtataattttttatccgtgttataatttcaaagtatatgactgtttaattgcggaggaacaactttggcaaaagatgatgtcattgaagtagaaggtaaggtagttgataccttacctaatgctatgtttaaagttgaattggaaaatggagccacaattttagcacacgtttctggtaaaattaggatgcactacattcgtattttgccgggagaccgtgtgactgtggaattatctccatatgatttaactaaaggtagaattacgtatcggtttataaagtaatataacggagggaaacatgaaggttagaccatctgttaaaccaatgtgtgaacattgtaaagttatcaagagacatggccgtgtgatggtaatttgctcagcaaatccaaagcacaagcaacgtcaaggttagaaatagagggggtgtagtttatggctcgtattgctggtgttgacttaccaagagataaaagaatcgttatcgctttaacttacatttacggtatcggtgaagcaactgccaagaaaatttgtgctgatgctggagtatctgaagatattcgttcaaaggatttaactccagaagatcaagaaaagcttcgtgctgaagttgacaagtaccgtgttgaaggtgacttacgtcgtgaagtaagcatgaacattaagcgtttagttgatattggttcttaccgtggtattcgtcaccgccgtggacttccagttcgtggccaaaataccaagaacaatgctcgtactcgtaagggtactaagagaaatcgttaattttatttataaggaggtttattgatgcctgcaaagaaaacagcacgtaagcgtcgtgtgaagaagcatgttgaaagcggtgtagcacacattcactcaacgtttaataatactttagtcatgattactgacgttcaaggtaatgcagttgcttggtcttcagctggtgcattgggctttaagggtagtcgtaagtctactccatttgcagctcaaatggcagctgaagcagcagctaagagtgcaatggaccaaggcatgaaacatgtagaagtttcagttaaaggtcctggtgctggtcgtgaatctgctattagatcacttcaagcaactggtcttgaaattactgcaattcgtgacgttacgccagttcctcacaatggttccagaccaccaaaacgtcgtcgtgtttaattttgtccttgatataggacgtaacgttttgaaaggggcccagtaatgattgaatttgaaaaaccaaatattaccgttgttgaacaagaagattcttacggtaagtttgttgttgaaccacttgagcgaggctttggtactactttaggtaattctttaagaagagtattacttacttctattccaggtactggacttgtttatgtgcaaattgatggcgttttacacgagttctcaacagttcctggcgtcagagaagatgtaaccaagatcatcttgaacttgaagaaacttgaattaaagtctctttcagatgaacaaaaggttattgaattggacattgaaggtccagccacagtaactgctgatgatcttaaagttgatgcagacgttcaagtcttgaatccggatcaatatatttgtaccattgctgaaggtggacacttgcatatggaacttgccgtaaagaatggtagaggttatgttgctgcaagtgacaataagagtgatgacatgccaatcggagttatcccagttgactctttattctcaccaattaagaaggttaactaccaagttgaatcaactcgtgttggtaagagagatgactttgataagctcacttttgagatttggactgacggttcaatcaagcctaatgacgcccttagttttgctgctaaaattttagttgaacactttaaggtatttgaatcagcagatgcaaatgctaaattcagcgaagtaatggtggaaaaggaagacgataagaaggaaaagaagcttgagatgactatcgaagagcttgacctttctgttcgttcatataactgcctgaagcgtgctggcattaatactcttcaagagttaactgacaagacagaatcagatatgatgcgtgtacgtaacttaggacgtaaatcattggaagaagttaaaaataaattaaccgacttaggtctttcacttcgtcaagaagactaagcttaggtgaataaaggaggcaaatccatggcataccgtaaattaggtcgcgatagtgctcacagaaaagcaatgcttagagaaatgactactcaattaatcatgaacgaacgcattgttactactgaaactcgtgctaaagaagttcgtaagactgccgaaaagatgatcactttaggtaagcgcggcgatttagcagctagaagaaaggctgctgcatttgtacgtgacgaagttgcagatgttcacgaagaaaaagatgcagttgttgttaagtcagcattgcaaaagcttttcagtgatgtagcacctcgttacaaggaccgtaatggtggttacaccagaattttgaagttagccgttcctcgtaagggtgacgctgctccaatggttattcttgaattagtttaatttagagtaacacaacttaatacgtattaagaattatccatgaaagtgagaataagcgtaaagatgatggcgcaagcttagtctagcttagatgataaaaatcatccctcttcatgggtgattttttttgctctttttttctgttacaatatgctaataagcgatttaagaaaggaagtggaaaaatgccagtagatagtgctgttgaatttaaggatgtctcatttacctatcccgatactaaaaaagcgattcttgatcagattagttttaaaataaaaagaggttcctggacatctttgataggtcacaacggtagcggtaagtccacaatttctaaattaattaatgggttacttttgcctgattctgctaataattctagaatcactgttttaggaatgacgttaaatcaaaagacagtctgggatgttagggaaaaagtcggtattgtatttcagaatccagataatcagtttgttggagctactgttggcgatgatgttgcttttgggcttgagaatagagctgttcctcgggagcaaatggtaaaaatagtcagaaaagttttagcagacgttggaatgctggattatatagatgcagagccagctaatctttctggtggacaaaagcaaagagtagcaattgcaggtattcttgccgtagaaccgaaaattattattttagatgaatcaacttcgatgcttgatcctaaggggagagagcaggtgctaaaaattattaagcatttaaagaaagagaagaatttgacagttatttcgattacacatgacattgatgaggctaatatggctgataatgtgatcgtcttaaatgatggcaagattttagctcaaggaactccaacggaaatttttagtaaaactgaaatgttgcaagaaatagggctagacattccatttgtacaaaaattaataaataaattaaatgaagtgggaatttctgtacctaaaaatataaaaacgaaagatgagttgaaacaatatctatgtcaattaaatttgaaaaagtaaattatatctattctcccggaacttcaatggagaaaaaaggattagataatgtttcatttgaattaactgaaaatagttttgttgcattggtaggtcataccggtagtggtaagtcgactttgatgcagcattttaatgcattactgaagccgagttcaggaacaattgatattgctggttatcatattactgctcaaacaggaaataagaatttgaaaaagttacgcaagcgggttagtttggtttttcagtttcctgaagcacagctttttgaaaatactgtgcttgaagacattgaatttggtcctaaaaactttggagcaaccgatgatgaagctaaaagtaaagctttgaaatggttgaagcgagtaggattggataaatcgctagcaaataagtcgccatttgagttatctggaggacaaatgcggcgtgttgcaattgctggggtaatggctgatgaaccagaaattttatgcttagatgagccagcagcggggttagatcctaagtctcgtaaggaaatgatgaaattatttgttgactatcaaaaagcaggtcatactgtaatcttggttacgcataatatggatgatgtggccgaatatgcagatgatgttttagtgatggaacatggtaaattagttagacatgatgcgcctaaggcgatttttactaataaaaactggctagaaaagcactatttgagtgaaccaacggctagtctttttgcctcagatttgacgaactttaactttaaagataaaccgttaacactggatcagcttattaatgaaattaagaaaaatttgcgagggtagtttatgagtaagataattgtaggacgttatattccgggagattctcttatttataaaatggatcctcggagtaaattattagttaccatattatttatattggctatctttttagctaataattcaataacttatgcgattgtgaccattttttgttttttggctgtgatcgctacaggattaaatgcaaaagtattttgggatggcgttaagcctttgattggtttaattttctttacgtcgcttttgcaattgttttttatgactggtggtcatatttattggcattggtggattttttcattatctagctatggtttgattaatgcaatctatatttttattcgttttacattaattattttaatttcaacagtaatgacagttactacaatgccacttgaaattgctgatgcgatggaatggctgcttaagccgcttaagttgtttaaagtgccggtggataaaattgcgttagtaatttcaattgcgcttcgttttgtaccgactttgtttgatgagacttttaaaattatgaatgcgcaaagatcacgtggagcggacttcaatgacggtggtttaattcaacgtgctaaggcaattacgcccattttggttccgttgtttattcagtctttagaaacggcaattgatttatctacagcaatggaatcacgtggttatcgtagtagtgaaggacgaactaaatatcgcgttttaagttggtcaaaatatgatttaattgcattattttattttgtactgttagtcggattactattaacttttaggacatattagaaatatgacgacaagatataaaatgacgatggcttatgatggtcatctttttcatggctttcaacttcaaccagaccagcgaactgttcaggggacaattgaagatgcgttgaagaaaatgactaaggggcagcgtgtgattgtgcaggggtcaggtagaactgatgccggtgtacatgcggttggacaggtaattcattttgattatcctggtaaaactattccagccaatcgaatgattttggcaatgaattctatgatgccaaccgatattatctttgatgattgccaaattgttgatgagaattttcatgcgcgttattcgattaaggggaaatggtatcgctatcgtgttagtttagatcattttgttaatccttttaagcgtttttatactggtcattttccgtatccattagatattgaaaaaatgcaggttgcagctcaggacttattgggtaagcacgattttaccagttttgcggccagcggtggtcaaattgaagataaagttcggaccatttattatgtaaacattactaaagacgaaaaagaaaatgaagtaatttttgattttattggttcaggctttttgtataatatggtgcggattatggtagcggcgctactggaaattggtaatgatcgtaggccaattcatgacttgcaacgagtaattgctgccaaggatcgtcaagaggtaagacaaactgctcatgcgagtggtttgtacctttatcatgttttttacgatgaaatcccacaaaaatatcgtttagaacagcatttataattgactttttatctaaaaggacgtactctagtatagtatgtttgtccacgataggccccggaaacttattgttttcaaactgcaaataaacggaggaatttaaattgcgtactacaccattagcaaaatctagtgaaatcgaacgtaagtggtacattattgatgcaactgacgtaactcttggtcgtctttctgcagctgttgccactattttgagaggtaagaacaagcctcaatacacacctaatgttgatactggtgataacgttatcgttatcaacgcatcaaagattagattgactggtaaaaaggcttcagacaagttctactaccaccactcatcatggcgtggcggcttgaaggccgtatcttacggtgaattgcttgctaataacccagttaagatggttgaaatctcagttaagggtatgcttccaaagaacactcttggtcaccatgaattcatgaagatgcatgtttatgctggcgaagaccacaagcacgaagcacaaaagcctgaaaagttagatattaacaaattaatctaggaggttatataatggcacaacaagctgcatacacaggtactggtcgccgcaaggattcagttgcgcgtgttcgtttagtaccaggtaacggtaagatcactgttaacgataaagatgttgatcaatacattccattccctaacttggttaaggacttgaagcaaccattgacattaactgaaactgaaggtcaatacgacattcacgttaatgttaacggtggtggtttctcaggtcaagctggggctatccgtcttggtatcgctcgtgcacttcttgaagttgacccagacttccgtagtccacttaagaaggccggtttcttaacccgtgacccaagaatgaaggaaagaaagaagccaggtttgaagaaagcccgtaaagcttctcaattctcaaagcgttaatatttacgttcaaaaatgttgttatatcaacgttttggagacttcagttggtcacctatggtcacaatgctatagggattccaatagatttaaagcattcgcatcttgcgagtgctttttttctggcattaattccagatagtatttttcagtagttaagattgaatcgtgtcctaatcttctgctaacataagataaaggaatattattactgaataaaaaagaagcgtgggtatctcttaaaccatgaaatgtggttgaagggatgcctatttttttgagcaattcttttaacataccagactgtttaaagctgaaccagtcaaacaaatagccagaatctttttgagagatatccttcaatagatcgtaaatattcttaggaatagtcacactgcgtctagaatgtttagtttttaatttagtatcgtcagtagtagggctaattgatcgttttacttcaacgcaataatactgaccatcgtaatgcacatcctcaggcttaatacctaaaatttcaccacgtcttaaaccagtactaatctcaagtaataccattaagttaaattcattatctgtatgttcaagtaagtaatgttttaacttagttagatcagacattgatgaagctttattgcgtttaggtaattcttttccgtgtgctttaagtaaactagcaaaatcattgtaaatgtatcccttaacataagcatagcggagagcagttctaattttcttaagtaattcagttaccgttttcttagaatgtgttttgccatatttatctaagatactttgcatttgtacgtcatcaagcttaccaagtttagcggttggaaaaagattatcaattactttaccagctttaacataattatcaaaagttgcttttctaacgtcatgtacttttactgtttgaacgaataaataataaaagtccttgaataaagtgttttgctgggctattgcttgacctttagccttttgtagttcaagagtagtactccaaactttagcttctttttcagttttaaaactcttagttaagtaatcacgttttccgagactgtaaaatagtttgtgtaaggatgaatgattccttaaatttatttctttaaacattagaaaaaggagttcctttctcgtatgattggtttgaacaaaaaaacacatacagaaagaagaactccttcatgaatgattttaccaaagattttgctcaagctctattcaatccagacaaaataaatgatttattgcgcaaagagctacaacaggctgttaataacttgctagaagctgagttgactgcctttctaggctatgatccctatgccagaaatggctggaatactggcaattctagaaatggtgcttatttccgcaaggttgatacccagtttggaccaattgaagtgcaagtgcctcgagaccgcaacggtcagtttcatcagcacacgctgcctgactacaagcagcactctgatgttttggaaagcacgattatcaagctatactccaaaggcgtaactaccagagaaatcgctgacttgattgagaaaatgtatggcagtcattatagtccagctcaagtatcaaatatttccaagcagatgctccccaagattgaggcttatcacaagcgcaagctaagcgacaagtttttctgtgtctatttggatgcaacataccttcctttgcgccgagaaacgtttgagcgtgaagcagtatatattgccattggcattaaacctaatggacataaggaagtcattgactactgcattgctcctagtgagaacattgaagtttggacagagatgcttcaaaacatgaagtccagaggcttgaagcaagttgagctttttctttctgatggtgttgttggcatgaaaacagccttggccaggacttatcctaaagctcattttcaacgctgcctggttcatgtcatgcgcaatatctgcgctaaagtacgcgtcgacgatcgtgaaaagatcatgaacgaattcaagcagatacatcaacagacaagcaaaaaagaagctgcagctgtcttgcacaaattctatgccaaatggaataaagcttatagccatgtcatcaaaggtttgaaggaaattgagcccgatctgctggtcttttataactatcccaagcagatcagagcttcaatttattcgactaacatgattgaatcatttaacaatgtaatcaagcgcaaagctaagcctaaggcagagtttccaactgaacagtcgcttgatgcttttattggcattcaggcaatgagctacaatgaccgttatttcaatcgaattcataaaggctttggtcaggttcaggacaccttagaatcctactttgattaaataaataattaaaaaatcaatttacgagaaagatctatttacacaaaagatttgacagtttccgttttccatgttgatagattgttactctggctctatatgatgagccacgtttttcaatacttgccataaatttaatcgtcctttcaaaagaaaagccgattatcttaccagcaataaagttagcagataaccgactatttctcaaatctttttcaattttgtttctttaagatcgatgaaagcttcgatacttttaatggtaaagcgttctgtgtgttctcctagtttaaatcttttaaagtcaggatcagagcgaaatactttatcaaaagttttgggatcaataccaatatattttgaagcttcttcgcgagttaataatttagccactattattatcctgagattgtttagttaccaatattgagataaaatctaggtagtaggtaatctagtcattgcttttgtctctattagcatgactagtatttttttgcgattttatcttccaaattgcttcggataatttatcatcagtgattagatcatttttaactttattagtattgcttttagtaagttgcaacgggataattcgtcttttcaactgttcaaaagaatcaatgacttgattagcaatattacattcaagataaaaactaagtggatcataaggggtagtgatgtaaatggcacgcgcatttagataacgatcgtgataccttgcgggagccattttgtctatttcccaaggatccaaaagggtaagtagttgaccatagtcatagtcatttggtcgcaagtcattaattactatgaatttttgccctttgtattcttgaaagtgatcccgttgactacctgaaatacagaaatcttcaggatgttgtttttctaaaatttcccgtactaacttagtcttaccaattccggaaacaccatatatccagtagaccttacaactctgacctttgaagtcctttaaaaaccgttgatgctttttgtaagctaggatgtcttcaatatgatctaacagtgttttatgttttgccatctcaagaacaccgatttcttcttgaagttcttctttagtgattttttcatttgaataatcatcaataaagttttcaattgcttgtcgtgatggctttttgactttttgtctaatctcattgattctatctttaaaatcaaatgaagctactacttcttttggatcataatgatgtttactcttagcattagtagtttcatggatcagatagctatagccattgttaataatactgtgccatgcttcaatatattgttcatgatcattgaaaatcttagatactcttgaaatggttttagcatctttgaaatgaagcattacatgatagtgaggtcgaatcttttaacttatctttactaaatggtaaatgatctaaatcttgggtatacataaagttgtgagaacgtattatttttttcacaattaaagatttcctttctattcaacacgaactacatattaactttggggctagataacaagttcattattactttatttttgtttatcagatggaaagcaattgcaagaagcagcagatatattagccaaggctaaggtgcatctatctatggtgatattttcaccttaaatcaaactgcagcagctatggttaaagttgctcaaggaggtaataagggtaaagtattactgcaaatgaatgaagcttaagttaacatgaaataataaatacatttagataaagaaagaccctcaaagattctaaatttgaatttttgagcgtctttttagattgctaatcattttaaaggtacttgtattacatttactcctgctttaataaattcattaattacactgttttctacaaaagtatcagttattaataaatcaatatcttttattgttccaatagtaaaattagagaatttattgaacttgctatagtcggcaacaacaataaccttttgtgattgctgaataatagttttattaacttctgcttcttccataactggtgttgaaataccttggttaatgctaattcctgcgcaaccaataattgcatagttggcacgtaaagatagaaatgctttagttgccaaatcaccgctcatgattaatttatgatgtatttccccacctgttaagatcactttgcttttagtattttcaaaatttccagcataaccattgttagcaacaattattatatcctttgttaataaatgtggaattgcatcaaaggctgtactactagagttaataaatactatatctccatcgtgaatatatctggctgcctcttttcctaagctttgcttaatgtaactaacgggctgagataatgggatttcttctagtgcaacaagggatatgacaccacgcttttttgaaatcttacccatttttgacaaataatcacagtctcgtcgaatagtcatttcagaaaccttcatctttttgcttaattcagaaatagaaatttcccttgtgtgatttagtaaatcaatgatttgcttgcgacgttttttaattacttgaattgaatttttcatttttaatgatctctttcacttcaataaatacttactaatacttcaccagaaaagcattaacttttgaatttaaataaaaaacgacccgaactggttactattttaccattcaaaataataattcacatattttatgttataaatgacttgaattttacaaaaattaacataaaatatgctaaattaacatatataatggttgaaagcactcacatctaagcgcataataacattgaagacgaggataagaaaattaaggaggatttattcatgtcagcaccaaaaaaaatagaagatgttaatttcaaaacttttgcagaaaacaatttcccagaatggggtacgttcttgaatgaacaaattgctgataagcaagtaccagaaaaaagtattgcaatgtggtggttaggctgtatgggggtttggattaagactcatgaaggcaccaacgttgctattgatatgtggaacggtactggtaaacatactcacggtgacggtaagatgcgtaaaggtcaccaaatgatgcgtatgaccggtggtgaagctttacaaccaaaccttagaaacaagccatatgtaattgatccatttgcacttcgtgatcttgatgctttatgtgtaactcacactcaccatgatcacttggatatttacactgcagcatgtgtaaacaagtattgcccagacgctaaatttattggacctcaaggcgttgtcgatgaatggatcgaatggggtgttccaaaggaaaagaccattgttgtaaagcctggcgatgaagtcaaggttggggccgtaactattaaggcaatggaagcctttgatagaactgaatttgttaccgaagatgatccaaacaagaagttagcaggtactatgccaattgaaatggctaaagttgctgttaactacttagttaagacttcaggtggtaacgtatatcactcaggtgactctcactattcaaacacttacgtaaagcacggtaacgaaaacgaaattgacgtaactctatgtgcatacggtgaaaacccacgtggtatcactgataagcttgacgactcacaagttttgagaatgggtgaagctttaaagacaaaagttattattccaatgcactatgacatttggactaacttctacagtgatcctaaggatattttagctctttgggaccgtaaaaagtaccgtttgcaatataaatttaagccatatatttggcaagttggtggtgaatttgattatccacaagacaaagataatttcgaatacatgtatgatcgtggattccatgatgcatttaagaatgatccagacttaccattcccagaaatgctatagtcccgtttttgttgattaactagctcaacgtctttaaccaaagctgttgagctgagggaggagacgctgatgttacgttactttttagaaaataatttattaaacattactgatgaacatcctgagacttgggaagaagcaattagagttgctggtaaggtaatgaagcaagacaagttagttactgatgattatattgattcagttattgctgatgttaagaaatatggtccatacattgttattgttcctggtgtggcaatgccacactcaaaggctgatagcgaaggagttttaggtactggtataggtcttacaattttgccagaaccagtttcattcgatgaatcagacccagataaaagtgcaaaattattctttatgctagcagctaaagataataatacacatgtcaaaaatattgcccatttatctgacatgttaatggaagataacatgattgatgatctttctaaggttaagaatttagacgattataaggcagtaatgaagaaacataatatgtgatatcggaagcggggagtataaatggctatattaaatattctatctaagatatgggattattttgctaccaatattttgcaacaaccagctttcatgattggttttattgtcttacttggttatatcttagagaaaaagaaatggtatgaggtcctttcaggcttcttgaaagcaacagttggatactttattttatcggctggttctgttggactgatcaatacttttagaccaattttagtcggattaaaagatcgttttcatttgaatgcgatggtaactgatccatattttggacagaatgcagttactgccggaattatgaaagagtttggtagatcttttgccgatactatgcttttgttgttatttgcatacattatcaatatcgtgttagtaagattttcaaaatatactaaattacgtgctgtttttacaactggtaacgtgcaagtacaacaagcggctaccgctttctggttgatcttgttctgttttccaaaattaggtcatttacctattttaatcgttatgagtattatcttaggtttatattgggccgttggttcaaacttaactgtagatattactcaagagttaactgatggtgctggctttgctatcgctcaccaacaaatgtttggtatctttattttcgctaaattatcagaatttttggaaaatagagccaaaaagaaaggtaagaaagaagccagacgattagaagatgtaaagttaccaggtttcatgtcaattttcaacgacaatatggtatctacatcaattttgatgttaatttttatcggtgcaattttagtagtattaggtccagattacttagttaaagctaaatttatgcaacctggccaaagttttattttctacatcttacaaacttcattacaatttgcagttttcttagcaatcttacaattaggtgttcgtacattcgttaatgaattgactgaatctttcactggtatttcagacaaatggttacctggctcagttcctggtatcgatgtcgcagctaccttaggttttggttcacctaacgcaggtacaattggtttcttgtttggtgcattaggacaattcacaatgatcattttattgttgattttccactcaccaacaattgttatcgccggatttatcccgttattctttgataacgctgctatcggtttgtattcaaataaccgtggtggtttcaaatatgcaatgatcatgccttttatttctggattgatccaaataggcgggtctgccttaattgctacctgggtaggtatggcgaaatacggtggttacatcggaatgttcgattgggctacagtttggccattcttcacagtattgatgaaattcttaggctttgttggtattgctcttgtaataatcattttggtaatgattcctcaattgcaatatcgtgccgataagaaaggttacttcatgattactgaagattatgaaggttggaagaagttacatggtaaagaatagaggttaattaaaatgaaaataatgtcagcttgtgctaatggttcgggaactagtttaatgctttctagaaccgcaagaaaagcaatggaacaattaggttatgaaattacagtttcagatcatacttctgtttcagaagctagaggaactgctagaaactatgatgtggtatttacatcattaccttttgtgaacatgtttgatgaagtaaagcaaaagggtggcgaagtaattggcgttaagaatgtaatgtcagttcctgaagtaaaagaaaagatcgaagcttcagatattccaaataagtttaagaaataatcttaggagaattaatttatggctttaccaatgttacaagttgctttggattgcgagagtactgctgaagctttaaatgtcgcaagacaagtaatggatcaagttgatgttttggagacaggaaccattctttgttatcaagatggtgtaaaggccgtatctgctttaagagcagtgggaccagataaaatagttttagcagatgttaaatgtgctgatgccgggactaagttcggtaaggcaagcaaagatgcaggtgctgattggatgacttgtattaacgctgctactgttcctaccatggttaatgctagaaaagaaattgaagttcaagttgaattatatgaaggctgggacaataaagaacgtatgcaagaatggcttaacaatggtattgatcaagttgtttaccaccaaagtagggatgcaaaatttgcaggccaaaaatggggcgaaaaagatgttgcaaacgttaaggccttgattgacatgggctttaaggtttcagtaaccggcggagttcatccggaagttttgaaattatttaaagacttaccagtgtattgttttattgccggccgtgatatcagaaatgcggaagatccacatgcgcgtgctaagcagtataaagatgaaattaagcgcatttggggttaatcattaattttactcatattaaaaaattccttaattagttttagaaagggcaatgcacgtaaaaacgtttattatgcattgctctttttgtattaaaaggcaggtataggttatgactgtaaactcattaggtatttacgaaaaagcattaccacaagatttatcttggaaagaaaaatttaatttagttaaaaaattaggcttcaattttttagaattttctgtagatgaaagtgatgcacgcttagcacgtttggattggaccaaggaacaaagaaaagaatttagagatttaatgtgggacactgacattcgaattaataatttgatgttatctggccacagaagatttcctcttggatctaaagatccagaaaccagaaagaaatctcttgaaatgtgccaaaaggcagtagatctctgtgtagatttaggaattcataatattcaaatggcaggctatgatgtttattatgaagaaaagagtgagaactctagagaattatacgttgaaaacttagctaaatgtgttcatatggctgcaaagaaaaacattatgctttcgattgaaacaatggatgatccatttattactaacattgcagatattaaacaatataaaaagcaagttagaagcccatggcttcaagcctatccggatttgggtaacctctctgcttggccacaaaatgatcctgctaaggatttagagaatggaattggtaatattgttgccatccacttaaaagatactctggcagtaacagatggttttgagggtaagtttagagatgttccatttggtgaaggctgcgttgattttgaaggactacttcgtgaattagtaagactagactataacggaagttttacgattgaaatgtggccaggtgataacggtgatgatgatcctgttgctgaagttaaagaggccaaagctttctttgacaagatctttaaaaaagttggaattgaacaagaacctgtagattagaaagtggaaaataaaatgttagaagatttgaaaaaagaagtctatgaagccaatatgcaattacctaagttaaatttagttacttttacttggggaaatgtttcagggattgatcgtgaaaaaggtctgttcgtcattaagccatcaggtgttccatatgaagaattaactcctgaggatatggtagttgttaacctaaaaggtgaagtggttgaaggtactagaaatccatcttcagatactcctacacatacctatctatataatcattttcaaaagattggtggtatcgttcatacacactcaccttgggctgtttcatttgctgcagctaagatggatattccagctttgaacaccacacatgcagatactttctatactgatgtgccagcagctgatgcattaactaaagaacaaattgaggaagattacgaaggtaatactggtgtcactattgtcaaaacctttaaagagcgtggtctcgattatgaagcaacaccaggtgctttagtttcacaacatggcccatttacttggggtgaaacaccagctaaggctgtttataatgctaaagtcttagaagttgtggcggaagaagactatcatactttgcaattaacacgtgctaattgccatttaccacaatacctacttgataaacactattatcgtaagcatggtaaaaatgcttactatggtcaaaataatgctcattcaaaagatcatgcaaagcgtgcctaaaactaaggggtaaaaaatgcttgaaaattatttttttgattttgataaaactctggctagttcaggtaaggcgtcattgattgcgacaaagcaggcatttaagttaaataatttagatgagccagatgatgatcaaattttagattttatgggtattcctgctgatgtttcattccctaaaatggctaatagagaattgtcagaaagtgatgcgaaaaaattagttgatacctaccgtaatatttatggaaagtatgaaaaagaaaatacacatttatatcctggaatgcgagatgtactagaggatttacagcaaaaaggtaaaaatttatttgttgtatccagtaaaagtcatgatattttaaagagaaatttagataatttgaaaattactcaatattttaaagactttgtgggatgcgatgaggttcagcattataagccagccccagatggtattttgatacttttagacagatacaatttgaataataaacaaagtgtaatggtaggggatgctcgttatgatttgcaaatgggcaaatcagcgtctgttaaaacttgtggagcagcttgggatgcttttagtgtggatagcttaaagaatgaacatcctgattatttgctatttcatgtggcagaattaaaaaatattgaatagagttcatatattttaaaattggatggtatcaattttgaaagtagttgaactctttagcaaaaatgatattattaacttgtaagggaaaacggttacataacggatggtctataggaggacatcatggctgtagattacgattcaaaagaatatttaaagagcgtcgatgcttattggcgtgcagcaaattacttatcagttggtcaacttttcttaatgaaggccccacttcttaaaacacctttagttgctgaagatgttaagccaaagccaattggtcactggggaactattgctccgcaaaactttatttatgctcacttaaacagagtgttaaagaagtatgatctggatatgttctatattgaaggttcaggtcatggtggtcaagtaatggtttctaactcatatctggatggttcatacactgaacgctatccagagatcacccaagatgaaaagggtatggctaaattgtttaagcgcttcagtttcccaggtggtgtggcatcacatgctgctcctgaaactcctggatcaattcatgaaggtggggaattaggttactcactttcacacggtactggtgctatcttagataatcctgacgtcattgctgctgttgaaattggtgatggtgaatcagaaactggtccacttgcagctagttggtttagtaacaagtttattaatccaattaaagatggtgcggtattaccaattttgcaaatcaatgggtttaagatttctaatccaactattgtttctcgtatgagtgacaaagaattaactgaatacttccgcggcatgggctgggatcctcattttgtttcagtctttaaaggcggtcgttttgacggtgaaaaggatccaatgcaggttcacgaagaaatggctaagactatggatgaagtcattgaagaaattaaggctattcaaaagcatgcccgtgaaaacaatgacgctactttgccacattggccaatgattatctttcaatgccctaagggctggactggtccaaagaaggatttggatggcaacccaattgaaaactcattccgggctcaccaaattccaattccagttgcacaagatgatatggaacataaggaaatgcttgaaaaatggcttaagagctacaagccagaagaattattcaatgaagatggttcacctaagaagatcgttactgaaaatacggctaagggtgaccacagaatggccatgaatccagttactaatggtggtaagaaccctaagcgtttgaacttgccagattaccgcaagtacgcattgaagtttaagccaggtcaaatggaagcacaagatatggttgaatgggctaaataccttagcgaagttgctgatcttaacccagacacattccgtggctttggtccggatgaatctaagtcaaaccgtttgtttgcacttcttgatgatcaaaagcgtcaatgggaaccagaaattcatgaacctaatgatgaaaacctagctccaagtggtcgtgtaattgattcacaattgtcagaacaccaagatgaaggattccttgaaggctatgttttgactggccgtcatggcttcttcgctacttacgaagcctttggccgtgtagttgattcaatgcttacccaacacatgaagtggttaagaaaagctaaggaacaatactggcgtcatgactatccatcacttaactttgtcgcaacctcaactgtcttccaacaagaccacaatggttacactcaccaagacccaggcatcttgactcacttatatgaaaagaatcgtccagaccttgttcatgagtacttgccatcagacactaatacgcttttggcagttggcgacaaggctttgaaagacagagaatgcatcaatgttttggtaacttctaagcagcctcgtccacaatggttctcaattgaagaagctactaaattagctgataaaggattgagttacattgactgggcttcaactgatcaaggctataagccagatattgtatttgcttcaactgaaactgaaccaactttggaaagtttagctgcaattgatatcttgcacaagcgtttcccagaccttaagattcgttacataaatgtagtagatgtgatgaaattaatgagtcctaaggataataagaatgctatctctgataaagagtttgatcgcttattcccaagtgacattccagtaatctttgcatggcatggatacaagactatgatggaatcaatctggtttgcaagaaaccatcataatatacatattcactgttacgaagaaaatggtgatattactaccccatttgacatgcgtgtcctgaaccaccttgatcgtttcgacttggctaaggatgctgttgaaagtattccatcattggcaggtaagaatccagacttcatcaatgaaatggatgacttgcttgctaaacaccaccaatacattcgtgataatggtaaagacattcctgaagtcactgagtggaagtggacaggtcttaagtaaaaaataaagtgtctgggaaaaaactaactcttagaccataataataggacgatcaaaattcttaagtgagttttaatcgtccttttttcttttaaaattaaataaaaacggtcttttggtcattttctgttccaatatttgcttatattcatcatcatgaaggctattccaacatcggtttcaactttctttttgcctcttagatgtgtttgccttcttcgctttgaagaacttcttttgctttttcttttaaatactgccagttagggttatagcgtacttgacgctggcgaccgctagctgtcttagctaattgttccagttctgacgtaagcttcaactgcctggcccttcagcttatcatgatacttttcgacagccttgcgccaaacaaaagtgtagcggttagcatcagcttcaattttagtgccatcaataaaaacagccccctcgttgatcagccaacagattggtaaagtagataaagctcttcttaaccagttcattggcatgactgctgtgtggtatactggtcgacctgttttagcagggtgtaaagcagaatagcttctggaatcgaatccacaatccagctgatagcattagccaagtgattgctgggaatggtaaaatccaaattgagtgttaaagctgtttgacctgtgatatgatttttgtacatattagtttccacctttttgttttaatgaaataagaggccacaaatgatcacattttttatggagaaatttaaaatgttaaattttagatcatatgaagacgcagatttcgaaaaattatgcaacatccacgatcaagcgcgaaagcaagaattaaaatttgccaatcttgaagctgcatttattccattcaaaatagcatcaaagaaagagcaattatttgaagactatcaagtttacgttgcaacaaaagaaaataaagttgttggttttgtcggatttaacgaagaagagcttggctggctctatgttgatcctaaagttcaaggacaaggtattggtagtaaactgattgattttacgcttgaaaattcgaccaggccattttatttagaagtgcttgagggcaatcctgcacaaaagctttatctcaaaaaaggtttcataacaattaaacatgaaagtggcaagatgccaggtaatgaatcatttagtgttgaagttgacctaatggaatataaataaaacatcccaatcaggtgtgttttttgttagacttataaaaaatgaagctagtcaataaagtattgtcttgtcattagaaagtactacatatgaagtatatttcatgaagtccgcttcatattttagggatgatgattatcaataataaaattaaggaataccgcaaaaaacatcaacttacacaacgcgagttagctgaaaaagttggtgttacagaacggacaataatttcattagaaaagggtcggtacaaaccatcgattgttttagcttataaattagtacaattttttgagacagatattgaaactttattttgcttaaatgagtatgtgaagaatgagcaagccaaaggaaggaatgcttacaattctttttgcgattctatcagtcatacagctcttagaattaatttatgatgttgcaaatagaaaaagcgtcaattatattcaagatgttatttggttaatattggtcatctgtttgacagtcggttatttctatagtactaaatatatcggtatagccaagattgaagaagatgatgaacgcgataaatttattcaaactaaaactaataatcaagcattcaatattttacagtgggtcctttttgttttaggtgcagtaacgataataattgatgttaatctcggccaaatgggattagattctcgtgcaatggttattatagttgtaggcgttgtattaatctttttatgggcattttcttggattttgcaattaatcttaatgataattaattatttttgcaattgagactacaaaaaataaagcgactggattagctctggtcgcttatttaaattttagtatggcatttctttaaaaaattagaatatcgatctttttcaccgtttaccttccaatattaaccattcaccgaaatttttaaatttaaaatattttttcgtctatactgataagcaagaaaggagaaaaagggatgaaggtaaaatttaacattgataatcaattagcgggagaaagtgctgaattttggttaaaaaagatgactaataaattcagtcaattgggtaaagaattaagtggtgaacaagacacgatttggtgcagttatgatgatgaaattattcctgtgaagtttgaaaatatttatttaattcaagtcgaacaagagcaaactttaatttatgacaaaacacagagttacaggtataaagggcaattatatcaggttaaaaatattttgccacataattttttaatagcgtcaagaagtgcaattattaattatcaaaaaattgatcatttggaagttatggatggtggcaatattgatgtcattatgaagaaccaaatgcgggtacaaatttctagaagaaaaattaaagacttgaaagagaggttagggttatgaaaagaatggaatctttcttggtaagtggaataagtggcatgggaattggattaacttggtattcaatagtaactttatttcaaacgggaacgaattggaaaaatgctcaaattccgtttacaagtttgctcttttatttgattgtctcttttgtgatgggagcatttttcaatttgacaggattgatttttgaacaaacgcaatggtcactacgaaaacaaattattgtaaacttttttgttagctatgttgccttttttgcttttgaattagtgattaatgatttggctttatcggttcatttcttcttagtaattactggagtatttgtcttgatgtacttgctcgcttatggtttgtactttttacaattattgcgagatgttaaacaaatcaatcaaaaattgaaagaaaagtaaataatcaaaaacgatcaagcctaaaaatcttgatcgttttttcgttggttagataaaaattataaactgtcttgaatattatcagctaagtagtcataaagcataccatgctttaattgcttagtatcaactcccaaagcttcagcaattgcataggcaaaggcccaagcggtagcaggaccacggcttgttaaaattttatgctctttatcagtaacggtgattttctctgaaaaatgagcacttggggcatcttttaagcattcttcttcaatgcctggataacaagtgaagtccgcatctgccaaaacaccatagcgagcaagagcacgtggagcagcacacattgcggcatcccacttgccagcttcatgacgcttaatcatcagatcacgtaatttttcattatcgcgtaagttagcagaaccagtcatgcctcctggaaaagcaaccaaatcataatctaataaactgtcatctacaactttgtcacaagtgatttcaatatgatggtcaccatctacttttttacttattaaacctaccatatcgcattcaacgttaagtctacgcaatacgtcaacaacgcttaaaccttcgacttcttcgcaaccgtctgcaaatactacagcaacttttgtcataaaatcatcctttctataactattttaattatctacttacattagatctaagtaaaatgaaagatctgctaatttgcttaaatgaagagtaggatgaggtgaaattggtattttatcttttttaggtgccagccacaatgatttaagattggcgttttctgcaccttgaatttcttcatccagattagttccaattattaaaactgtgtctggatcaatatctggattgtctttcagaatcttaaagaaaatatttttgcttggcagcttgtccgtaaaatcatcggcgaaataagcattgtcaaatgaagaaagcaattctgtaggtgcaaggcgcggttcgatttgagtgcgcttttctttagcaaacaaaatcaaatgcagcttgccactgacttcatcaataaagtcgatggcgcccttgactaacatggtttgatccttcattgcatcatcaaaaacagttcgcgttttagaaagatcttcttttaaaaatgtagataaagctaaatcgatttgatcatcgctagataaatttttaaattctttttctaagctagtgtagcgtagtcgctcagctggtccccagtctaatccataatgttttaaagtttgccgcagcgcagttttttctgctaatttttcatttaataaactgccttctggaatgaaaattaaggtttcaaatgtagccatgaataaacttcctttgtgttagttcctattagaattataatgaactagacaattttaggaaaggaattaaaaaatgacaatctggaccgtaattttcttattattaggtggtgttgcaggtggcttattatcgtcagtggcctcaatggcatcacttgcatcatacccagttttgctagcagtaggaattccaccagtatttgctaatgtaactaatgatgcggcgctaatttggactagcatcggttcaactgtatcttctactaaggagttaaaaggacattggaagcaagtttggttctataccatttttacagttgtgggatcaattttgggttgtattttgcttctatcttttcctccaaagatttttgaaaaagcagtaccattcttcattgctttctcaggattgatgattattgtttctgggaaacatcatagtttaaataccaaggcgcaaccaacatggcttaaaataatttattttattgcacttttaattatggggatgtatacgggttactttggtgcagctggtggagtcatcgtactagtacttttaacttacattaccaatgataaatttattgttattaacgctattaaaaatgtgatttgtggttttgccaatttggtagccttaattatctttatgtttacttcgcatatttattggcttcaagcgattcctttggcgattgggatgtttattggtggttatattgggccagctattttaagacgagtaccggaaaagccagttcgaatttttattgcaagcttggccttcattcaagccggttacttcttttatacggcatacctgcaataagtttggtacaatattaagcaatgaaaagggggctaaggttgatggcaacagaagtttatttggtacgtcatggtgaaacaatgtttaaccaattggacaaagttcagggttggtgcgattctcctctaaccgtgaaggggattaacgatctaaagagaaccgctaaggccttgagtcaagttcactttgataacatgtattcatcggatttgaagagagcaattgataccgttcacttgatgaaggatgctaatgtggtctcggatattggtaaaattaaaaagctgcctgaatttcgtgaggtcttctttggaacttttgaaggcgatgatattaaccagacttgggagcaagtagcactagccgcaggaattggccatgaagatgatgtaactaagatcatcaatcaggtaggcttgcgcaaatttcgtgcagcaacaaaaaaggctgatccgcgtcatttagcggaaaatcaggatgagttagatgagcggatggtacgggcaattgacgttttgcgcgatttaactaaagatgaacaaagagttttgttagttagccatggtgactttattaaaactttgtccataaaatattggaataagagtaatggcaaaaacgatattgtttttccaaataatgggagcgttactcgtggaattttgtacgatgacggttcatttgaaattgttgattataatgtagatgctgaagagctataaaagtcctactgccgaagtagggccttttttggtacactgataacgaaaggaaaatattttatgaataaagatcatacaactaagcgttatgtcttcgtaactctactgaatgttgttattactattgctgaatttataggtggtattttttcaggttcattagcactgctttcagatgcagttcataatctgagtgatgttggtgcaattattttatcttttgtggcgcacctgattagtcgcaaaagtcgtaatcagtttaagacctttggttatgaaagagctgaaactttagccgcttttactaatggcgttatcttgatcgtgatcagtgtggttttgtttattgaagcaattcaacgtttctggaagccggaacatattcacggtggcattatgctgattgtctcgattattgggctggctgccaatattatttcaatgctagcaatgcatagcgattccaaggctaatttgaatgtacggtcaacttttattcatatgttaagtgatgccttgtccagtgtagcggttgtaattggtgcgatcttcatttacttctggaatgtaacttggcttgacccagttttgactattttagtttcaatctttgttttgcatgaagcttatgaaattacaatgaaagcagccaatgttttgatggaatctaatcctgatatcgacttgaatgaagtgaacaagattgttttatcgttccccatagttcaaaatatccatcatgtccatgtttggcgctacagcgatgactttattatgatggacgcgcatattaatgtagccccaggattaagagccgatgaattagagcagctataccaagatattggacaggagttacaaaaagagttaggtattaatcatattaccttacaagcagagtgcgagcgtggcagaaaagacaagatgatcgttccaggccacggtattaacgaagattaggtgaaagaatgtttaatgttaatatttttacagcgattattgtattgattatgggtatttatgacatgtcctatgcttttaataggcgtaagcaacctaccaataaaggcggcattagagcctttatggctttaggaattatcttcacgatcgcaggaattgttatgatcgttagagtattaatgaagtaaggaatcttagaatggctaaattagtattagttcgacatggcgaaagtgtggcaaatgctgccaatgtttatactggctggaacgatgttccgttgactaaaaaaggtgaagaacaagcagaaaaagctggtgaattgattaaaaccatttcggattttgctcccacccacattcatacttcagtcttatcccgtgcaattgtgacagcaaatatagtagccgatgtctgcaatttattatggctaccgatgactaagacctggcggctgaatgaacgccactacggtgctttaagggaccttaataaggacatttcacgtaaagtatttggtgtggaacaagttctattgtggcgacgtagttttgattcagttccacctaagcaggggtcgccaatgattgatcgccgttataagcattttgatcagcatttgatgccacgggcagaaagtttacatcaaactcaaaaaagacttatgccatattattatgatcatatcgcatctcgattgattaatggtgaagaccaactgatcgtagcccacggttcaagtttgcgtgctttgataaaaaagctagagcagattaatgatcatgacatcgtaaaactggaagttcctaatgcggaaccgattgtttatactatggatgagcacttaaagattattaacaaacaaattttacgtaaataatgttaaaaatgcaccttagtgcatttttttaatgctctaaatgaggttttacacatatctatggtaaaatctattatgatttctagtatatttagtttggagtattaggcatgcgtaaattatttttattacgaggtgcacctggctccggtaaatcttcttttattgctcgccatcacttaaatccttatgcgatcagtcgtgatcaaattaggctactattggcggatttgacagtttactatcaagaggatgcggatgttttacaccaagtcattccgcggcacgtaactgtgcgtactgagcaaatggtggatcaccttgtagaacacaagatggaatatggggaaactgttattgtggatgggacgcatatcgttccaagtgcgattgaacattttaagccttgggtagacaagtatcactatgaatgctttgtagtagatctgatgcaacatactaccttagagagtttgcttaagcgtaatcagactagaatgcattacgattgggttaagcctgaagtggttaagcaaatgtatcgttcttatgaagcacatccagaagtaccatactgggcacataaagttgtgccaaatcagatggatcatgcgttgtcacagcgtgagacaaatttagatcgttatgctcatgtgattgcggttcctgacatggtagatgaagaagattttccacatgtgcatatctcgaacttttatttttcatttaatgacaagtttacagaaaagtatggaacttatcgaaatgtagtttcaattgctaaaactgaagatgaagcagttaagcagtttaagttgccatattttgtctttaagtttcatcacaagcactttttgatttcagcttatccaattcgaaatgagatgttggatccgatcagaaaggttaagggagtttggacatattcaactggtttgtataatgtagcggattttgtgaaagaatttccggaaaataaaaagcaacatgtgcatcagttcaacttaagtaagttagatccaacccgcttattacatatttggtaaaaaagacgtagttagaacattttatctaactacgtcttttgtgtaatttacttatattttgttttacttcaatttgccggccttagctaaaacttctttagccttttcaagtgaatggtgttcttcacgataacgcttgatgtcatagccatcaacatcggttaacttgctaagtctatcatcaaggtctttgaattctttttcaagatccttaatgacgccttcttcatcttcaacgtaaacatactcattttcatcagctttggcatcaatcttagcatcgtattcgccgacttttctagcatgtttcaaaatagatttaatatccttaatcgtttcatgttgtgcagtacggtgacgacgatcaggtactgaatcttcaattctagcgaagtggctttcagcatcactaattttctttgaaattctatctaatgcttttaattgtctttttgaatagtctgtcatgcttttttcatcctacgtaaactttaccatttgaatcctctctaccgaattcgccttcgttgtaggcctaatatttttgggatacaagaaaggacacttgaagttgtaaaaaaagtgtcagaaatttctttccgacacttaactatttgattatagctattaatacttaaatgctaaggcacccattggatcccatggcaataattgaattgggttatctttgccttcatcgtaagccttcttaagatcttctggtaagaatttcttgttgataactgcttggtaaacaaatgaattaaaccaagaatcactcattacgaagtaacccttaaagccaggtttttcaccccatgagttttcgatcttccatttagttggcttaccgtcaacgatatcaacaccggtaatcaccatggcatggtccatcatgctttcaccagaatcaagcatgtcggctttagacatagtgaagtcagcatcaaataattgatcacggcggtaaaggttagtatcaagaagtccagcacggcgttcagaatccttaactacgtttgaaccgaaccaaacaacttcgccactcttcaattgtttaatgattaagtccttcatttcatcaactttaaggtttaagtggcgaacttggcgaccgccttcaacgttacctaagtattcaactgagaataccttgtggaaaggtttgtcgttagttggagcattgatagttgagatatggtttgctaaatccatgccaacgtacttgtcaaagaattcctttggggtaatgtccctgtcaatatggtaattcttgtcatcatcgcggtattcgaagttgaacttctttggtggaacacccaatgaagtagccaaaatacggaagacatcgtttagcatttcttccttgcgagcttgtacttcatcttctgacttgccatcttgaactaatttacttaaacttcccacacgcaaaattgcttgtttcattgtgattctgcgtgttttgacaaatataaaaggcacaagtccttttcattgctataattatattgaccaaaacataatttatttgcatgaaaggcttgtgccaatgtctattttaccatctcctgaccaacaaaatgaacaactattttcaaactcaatcatcagcttcatcaagaagtttcaggtgatcaagctgttgagaaaatgtggcttccgcaaggaaaaaggcattagcctgttcagcttgtttctttacgttttaagcaatgtctttcgtgaccgcagcttatatatgcagctgaaaatggatcattttcaagaaaatttttccaagaactcatattaccgttttatgcgcaacgttcacgtcaattggctccacttcaccacacttctgtctgcgcaaatcattaataaccacttgcgatctttgacttcagaaaaacgggctgattgctttgttgtcgatgattcctacttctctaggaccggcttcaagaaaacagaattagtcgccaaagtttttgaccatgtatcaatgacttacaagaaaggttttcgcatgatgaccctgggctggactgatggagcttctttcatgccaatcaattcagtgctgctgtcttctcagaagctacagaatatgattggcgaaaataaagtttttgatcagcgcaccattgctggccaaagacgtatgcttgcccggactaaaggcacagacgtgatggttaatttaatcgaccaagctatgaaagcaggtcatcaagccaagtacgtgctgtttgacagctggttctcaaatccacatcaaatcgtccagctcaagcaaaggaagctggatgtgattgccatggttaaggttagctccaaaatcaaatatgaatttgagggagaacgcaaaaacatcaaacagatttatcgcagctgtaaaaagcgatgcggccgttctcgctacctgctgtcaatcccagtcaaagtcggacgccaggacaaagacggtgctaaaatagatgcacggattgtctgcgttagaaaccgtgccaatcgcaaggattggctggcaatcatttgtaccgacatgtcgcttagcgaagatgaaattatccgcaactacggcaagcgttgggatattgaggtttttttcaaaacttgcaaaagttatctaaaactaagtacggaatatcatggcctgtcttacgatgctttgaccgctcatgttgccatagtttttactcgctacatgcttatgtcagttgccaagcgggacgatgaagatgaacgcacgctaggcgagctgttctattgcatgattgatgagctggcggacattacttttagccattccttgcaattgattactgatgcaatgctggccagcgtaaagcaagtctttcatgccagtgaagcacaaatagctgaattcacggctgactttatcaatcgtttacccaaatacatgcaaaaattgttaaagaaaactagcaaaaataatatagaagcctaaagccaagcaagatcaagagattactggcttatttagtgtgggaagtttaagtaatttacgtaactcaagaccatctttacgaagcaaagtatttaaagtgtcgtttaatgcacttgaattagtagcattagcagtttctggataaacactcttaggaacgataccatatttttcaataataccgcaaagcatgtcccattgaccgccgtcttgttgaggagtcgcaaataagaatgaaactttacgatcgcccaagtccttatcagcagttgcgatcacattttcaaagaaccagttagacttttcaaatttatcccagaagttagtgtaattttgagataattcgaagtcctttaacttaaatttcttttgtaatgggtgacgcatagtgtttaaagcactgaacatccagcagcgaccagactgcttttgatcggcagggttacctgtatcaatttcgattgagaaggttggatctaggtcgatcttagtttgtaagttttgactagctttgtagataccgttttcttgagcagcgtgactagccacatcaaaaacagggtggttagctaagtcttgttcaaatttattaatagtatcattgttgatttcttttaccataaaaaaaatcctcctttataagtacttaaattaattttatcttattcaaaatgagtcgtctaataatcttatcgattaaatggacgatgataccaaattttgtgaaattgaggatgctgggtgaagtagtcaatgatcataggatcaagcggccaaatgggtaagttagtttcttgagctaattgccaaactttttgcatttgtttttcaagcaaatccttactattaaattgtggattaataaaaaaatggttcattatccagacattactgtctttgcgagcgattttatctaaggtaacgctagataatagtatgtcttcttcattttttatagtgaaaatttggtgcgcatcttgcttattcataaaaaattcctttttaaaaaaataatctcatttttttgcgtaataaataatagagagctatttattttgtgttgactaaaaacattgtaaaatagataactgtcaaaataaaagataaatggagctttggaatgaaaacacgtggatttgaagtagtcaaaaagtatcaagatcaggaaattaatcttcctcgcagacagaccctagctagtgcaggctatgacatcgaagcggctgaagacattactatccctagcatttggcgactaaattttgtgcgaatttttaggttgattagaaatggacaccagctgtatgagcgcgactatgagatggcggatcagattttaaagccgttgttagtgccaactggacttaaagcttatatgccagaagatgaagtgttgattttagctaatcgttcatctaatacttttaagcgtaatctagctttgccaaatgggatcggcgttatcgatgcagattattacaataatcctaacaatgagggcgaaatttttgtacaaatgattaattatggcgtacggcccttgcacatcaagaagggagaccgtattgctcaaggcatttttatcaaatacttgaagaccgacgatgatgatccaattagtcgaaaaagagttagcggctttggatcaactaatgaaaagaagggtgattaatggctagagtaaaaacacaatataagtgtcgttcttgcggctatatttcggcaagctatttaggccgctgccctaactgtggtgcttggaatcaatttgaaaaagaaactgaagaagtgcaaaagcgttctactaaggcaactgctagtcgtttgattcagaagactggattaaatgaaccggtaaagctggataagattaaagctgaaaaagaagaacgaattgtcactaaatctgaggaattaaaccgcgttttaggtggtggtattgtgccaggctcactagttttaattggtggagatcccggaattggtaagtcaaccttgatgttacaaattatgagtgacttatctgaaaaatataaggtgctttacgtttcgggagaagaatcagctaaccaaatcaaattgcgggctgaccgactgggtgtaggtcaaagtaatatgctcttatatccagagactgacatgcatgatattcgcgaacaaatcaatgatgttaagcctgactttgttgtaatcgactccattcaaactatgaatgaaccaagtcttgattcgatgactggctctgcctcacaggttcgtgaagtaacaagtgaattaatgaaaattgccaagatggatgccattacagtttttgttatcggccacgttacaaaagagggtgcgattgctgggcctaagatcttggaacatatggtggataccgttctctattttgaaggggatgaacaccattcttaccgaattttgcattctgttaaaaaccgttttggagcagcaaacgaaattggaatgtttgaaatggttaatgaaggcttaagagaggtaactaatccatcatcaatttttctggaccaaagattacctaattctactggctctgctgtggtggtatcgcttgaaggaactaggccacttttagcagaaattcaggctttggttactccgacagcttttggctatgctaaaaggaccacgtcaggtattagttttaacaaagcttcattgctgctagcggtgcttgaaaaacggggaaacttaatgttgcagaatcaagatgtctatttgactgcaactggtgggattaaattgaatgaaccagcaattgatttagcaattgccatggcagttgcatccagttataccgataaagaaatttcgccgacagattgttttgtaggcgaagtgggcttaactggtgaagttcgccgagttgataaaatcgatgcacgagtaaaagaagcggctaaagtagggtttaagcggatctttattccacggcataatatgtattctggattaaaagatcatggcattgaggtaattcccgtttcgagtattccccaagctttaaaattagtttttggctagcattaattgaattcttactatataacgagtaaactaagattgtttgaatttactattttttgaaagaggcatgaattttggctaaagaaaaaatccgtgtaagatatgcaccaagtccaactggtcacttgcacattggtaacgcacgtactgcactttttaactatttattcgctcgtcataacaagggtacgatggtcttgagaattgaagacaccgaccaaaagcgtaatgttaagggcggttctaagtctcaaatggaaaaccttcactggttaggaattgactgggatgaaggtcctgataagggtggcgactatggtccttatcgtcaatcagaaagaaaagaaatttaccaaaagtatattgatcaattgatcgatgaaggtaaagcatattactcatacaagactgaggaagaacttgaagcacaacgtgaagaacaacgtgctgcaggtgttgcacctcactatacttacgaatatgagggtatgactgctgatgaaattaagcaagctcaagatgaagcaaaggctaagggcttaaagccagttgttcgtatccacattccagaaatggaaacttattcatgggatgatattgttaagggacaccttgagtttgaatcagacactattggtggggatttcgttattcaaaagcgtgacggaatgccaacttacaactttgccgtagttatcgatgaccacttgatgaagatcactcacgtacttcgtggtgatgatcacgtttctaacacacctaagcaattagttgtttatgaggcacttggttgggaacctcctaagtttggtcatatgacattgatcattaattcagaaactggtaaaaaactttctaagcgtgacgaatcagttcttcaatttattgaacaatatcgtgatcttggttacttaccagaagctatgtttaacttcattactcttcttggttggtcaccaaagggtgaaaacgaaatctttaacaagcgtgaattcatcaagcaatttgaccctgcacgtttgtctaagtcacctgctgcttttgaccaaaagaaacttgaatggattaacaaccaatacatcaagaaggctgatcgcgacactttgcttgatttagctttgaacaacttgcaagaagcaagtcttgttgatgagcatccaacaccagaaaagatggaatgggttcgtcaattggttaacatctactcagtacaaatgtcatacactaagcaaattgtagacatggctaagattttctttgaagaagctaaggatctttcagacgaagaaatcgaagaaatcaagaatgatgatggccgtggtgtaattgaagaattcaagaagcaattagacctcatcccaagatttacttcagttcaaatcatgaacgctattcaagcaactcgtaaggctactggcatcaagggaagaaagctctttatgccaattagaattgctaccacgcgttcaatggttggacctggtattggcgaagcaatggagcttttaggtaaagaacgtgtattagaacacattgatttaaccttgaagcaaatgagtgctaataatctttaattagataaattgaaaaagaggctgcaaataaatgcagcttcttttttcatctgctaaaataaaaattagttattttgacagaagggacaagtgttagccgtgagagtttataatacactgacgcgtaaaaaagaagaatttaagccattagttccaggacatatcagcatgtatgtctgtggaccaacggtgtataactatattcacattggtaatgccagaagcgcaattgcttttgacaccattagacgctattttgaatataagggttatgacgttaagtatgtttctaactttactgatgttgatgacaagatgatcaacgaagcgagagctgaaaaaacgactgtacccaaattggctgaaaattttatcaatgcttttttggctgatacgacagcgctaaacattgagccggcgactttgcatccccgtgcaactcatgaaattaatgacattatcacttttgttaaaagcctaattgacaatggctatgcttatgaagtagacggcgatgtttattatcgtgccaaaaagtttaagcattacggtcagttaagtgatcaaaatattgaacagcttgaagagggtgcttcagagcacattaacgatacagaacaaagccgcaaagaagatccaatcgattttgctttgtggaaggcgcaaaaggaacccgatgaaattgcttgggattcaccatggggcaagggacggccaggctggcatattgaatgttctgtcatgagtaccaaatatttaggcgatacgatcgatattcatggtggtggtcaagaccttgaatttccgcaccatgagaatgaaattgcacaaagtgaagctaagaccgggaaaaagtttgttaattattggctgcataacggttttgtaactgtcggtaaagatcaggaaaagatgtctaaatcactgcacaatttcgtaacagtgcacgatattttaagggaagttgatccgcaagtactgcgcttcttcatggctagcgtacaatatcgccgccaaattaactattctgctgaaaatttagcacaagcagctacaattttagatcgctttaaaaatactttgactaatattaattaccgtctagaagatgatacagctagtgaagaatcagccgaattagcacaggcgattatggcaactaacgaaaaatttgaacaggcgatggacgatgactttaatgtccaaaatgctttaacagctatctatgatttgttgcctgtagttaatgccaacgctaatgctgctagagctgacaagcaagaattgcaaaagtttaaagagaaattagctagttggttattagtgtttggcgtggatactaataagctttgcgttaaaaatgctggctccaatgacgatgaaattgacgctttagttaaaaagcgtgatgaggctcgagcaaataaagattgggcaactagtgatcaaattcgtgatcaattaaaggaaatggggatcactattcaagataccccacaaggaactaggtggactcgtgactaaaataaaaaaactaacggaagaggatgttaatccggatactttaaatggacaaactttagcctatttaggggatgcagtgtatgaattaattattcgcagacacctagttaaaggcggtatcgttaaaccacaagtattgcagcgtgaagcgactcactatgtttcagctaaagcacaagctgcgttggtaactaagatgcaagatgaagaaatgttaacggatgatgaattagctgcttttcgtcgtggacgtaatgctaaaagtcatactaaggctaagaatactagtttgaaaacataccaattatcaacaggctttgaagcaatgattggttatcttgatttactggggaaaaatgatcgagtggcagacttaagcaagtggtgtattgatactgtagaagaggacgggctgaaaaattatgacttcaaataaagattttgtctttggacgccatgctggacttgattatttaaaaacacaaagtgccgacaagattaataaggtttttttacaacacggtgtacaagaagaatttgctaatcaagtttatagtttagctaaaaaaaagcgtttagttgttcaagacgtgcctaaaaataagcttgatcgtttggttgctggtggcaatcatcaaggtctagttttagcaatttctagctttgaatatgcagatttaaatcaattgctggacaagtatgatgcggaaggtaaagaaccatttttattaatgttggattctattgaagaccctcacaatctgggatcaattttgcgttcagccgatgctactggcgttgacgggatcattattcctaagcgtcacgcgactggcttaacttcggtagtagctaaaacatctacaggagcaattgattatgtgccagtagcgcgcgttaataatttagttcaaactactaaagaactgaagaaacgcggttactgggtctttggaactgatatggcaggtactgattatcgtgaatggaatgcccaaggcaagactgtactcgtaattggtaacgaaggtaaaggcatcgccccattacttaaaaagcagatggatcaaactattactttgccaatggttggtcacgtacaatccttaaatgctagtgtggcaaccggggtattgctttatcaagcttataacagtagaaatccattagtaaaataaacagaaagtagacaaaagtgtgagttttgtctacttttttagatacataaagctcatttctgtccattaaacatgtgttttcttctcaaactcaggggatagtctgtattctttgaggtggaggataaattgaatgattaatgaagagaagctgattaagaaagtacgggcaggagatgaccaagctttagaaaaattgtttcatttatatgagccgttagtaaattcaatcgtgaagcaattctatttgcatcattatgatcgtaaagactgggatcaagaggcaatgattgtttgttatgaagcagcactagttttctcgcctaaaaaggggaaatttagcagtttatataaaactaaattgtttaatcatgcacggaccttggtacgttacaatatggcacgtcgcaggcaaatctatagtcaatcgattccgctagaaaaggcggacattcaaggaagcgtgaatgaaccatgccgctctgaattatcgattccagttgatgagacttacaataattttgttaatagcttgtcacacgttgaattaattgcattattaaccataattggcgagataagtacagagtatgcgattgatcatctaaatattgaagcaatgaagctggtcagagctcgagcacgaactttacagaaaatgcggaaagtgcttttttgatagctgatcaaaagaaagtgcggtataataagtaatgtagaatattttaggaggtaatttaagatggcagacgaaattattaagactgcattgttagaccgtcacatgaaggaagcttttgactggagtgattcagatatgccagttagagatgccctttgggactactttatggaaaagaatggtagagataccatgaagacggaagaagatatgcttccatttttgaaagactcagacgataaaatcgaagccttcgttaacgaaaatcttaagaagtaaatccgactaaaaaacaatgttctacgcaccgtggtcacgcatagttttgaccactaagacagctaccttctccggtggctgtttttttatactaaaattaagaaagaattttaaagatgaaatatataattggcatagacataggaactactgcgactaaaggtgtgttgtatggcgaagatggaagtgaagtagctaaattggcaatttcctatccattgattcaggaagaagcgggacaggctgaagaagatccacagcttatttttgacgcggtacagaaaatgatttatcaattaagtcagaaagcatctggtcaaattttggcaatttcttggtctagtcagatgcacagcttaattggcttaggtgaaaataatgagttactgacaaacagcattacttgggcagataatcgtagtagtgatgtagtgcagcgggcaaaaaagtcgggctgggcaagaatgatttatcagcaaacggggatgccgccacatccgatggcgccagtgtataaattgctgtggcttaaagaagaacagccaacactttttgcacaagtaaaaaaatggattagtatcaaagaatatattatttggggcttaactggaaaaatattaactgatacaactatggctgctggcagtggaataatgaatttaaaaacgctgacctgggatgaaaagatattggctcagattgggctagatcaagttcaattgccgacaattgctgatcaacaatctactgtgggtaaaattattccagaatatcgtgctaaattgggtttaaatgatgaaactcaaatcgttttgggcgcaagcgatgggtatttgtcaacgattggtgtcggcgttttggatgagaaagattttgcattgaatgttggcacttctggtgcggttagagtaattgcaccgaaggcaattgttgatcaaaagaatcgctttttctgttaccctgttgacgccaaacattatttgcttggcggccctgtaaataatggtggaattgtgttcgattgggccagaaaaacaatttttggcccagatgaaacggcagaggacgtcttaaatgtggcacaaactgctccggctggaagtaatggattgttgtttcatccttatcttggtggtgaacgagctccaatttggaatgctcaagcacgtggatcttttgttggcttgacgcgaaatcacactaaaccgcagatggctagaagtgttttggagggaattgtttttaacttgcttggcgcctctcaaggattgcttgatcaagtgggacagcctcaagctttacgtgttactggtggctttgtgcaaagtgattttgttagacaattaatcgcggacatttttaacttaccagtgattgtaattaaaaatgagcagtgtggtaccctagcagctatgtttttagctaaaactgcattagaagataagccagacctggaaaagattaaaaagcgtactgccgaaagccaagtttattttccaaatccccaaaatgtagcgatttatcaagaattgattctcgtttatcgaaaaattgagcatgaacttgaagcctcttatgaagatttggctcagtttcaagataagcatccacagaaatttgagtaaaacaaaaaagacgcattgcgtctttttttcatagattgattaactattaagcattttcaatatcttcaacaatctgatcaactgtcatacgattgtctttcaaaatttctttcaaaggtacttgatcagtatagacacgtttttggccgtagttgagtactttaatatccttgtcgccaaggtaggaagctactttttcaccaaaaccgccgtccaaaatattgtcttcaatagtaacaataactttgttttcttgagtcaatttgtctaaagcggcagtgtctaaaatattagcagaaactggatttactaagctagcacctgtcttttcagccacctttttacctagcatatcgtacatatcacctaacgctaaaacagcaacatctttacctggtttaatgtcgtacttgatttctgaatagtcaacagcagtaatttctttaccttcaggaacatctttggtaggcatcttaattgctacaggatgcttcttttgcttaatagcccattccatcattgccttttcttcggctaagttagttggagcaaggtagatccagttaggcaagttagaaatcattacttgatcaaacacacctaggtgagtcttacttgtgccagaaatgccaccaccagcaaccatcattacaactggtaaatcattagcggcaacatcgtgtgataattgatcaaatgcacgttgcaagaaggttgaattttcaaataaaactggagttgcaccttccttagccattccggcagcgaaggcaacggattcttgttcagcaattcctacatcatggtagttttcaggatatttgtttttaattctgtctaagccgaaaacgccgggaattgcggcattgatagccatgatcttctcaccattattgatgtgatcttcaagaacatcgagtgcaatagagctagcggtcggaccttcaggcattgctactgtcgtcttgtcagtctttaaatcgaatggcattacccagtggtgtgcttcttcgttgtcgattgcaggttgataacctttgcccttgagagtgttgatatgaagcaaaatagggtgatcaacatttttaactgctttaaaagcatcgatcattgattggatatcattaccatctgcgacataacggtaatcaaagcctattgcagtaaatggattttctttggtttcaccattagaatcacgtagtttctttaaagcagtaactaagccaccgacgttatcatcaattgacatttgattgtcgtttaccactacaactaagttatgcttttcaattgcagcgttgtttagcccttcataagcaaggccaccggtcattgaaccatcaccaattaaggccatgatgttttcatgtttgcccattaaatcgcgtgctttagccatcccagttgctaaggcaattgaggtagatgtgtgaccgacggcgtaatagtcatatgggctttcatcagggttgctatatggagttacatcttcatagtggtctggatcaagccaagcgagtgcacgtccagttaacattttgtgcgggtaagtttggtgggaaacatcccagacaatcttgtcctttggtgcatcaaaaacatagtgataagcaattgtagcttcaacgattcctaagtcgggacctaggtgaccaccttcagcggcatctttttctaagattagagtcctaatttcactggctaacttttccatttctggaagagataatttttttaaatcagcaggaccagaaattttattcaatagatattcaggatgtttatttattattatgtcctttctaacaagtagttacacttattatagataagcaaaaatcaaaataaaaatatttagttgtaattgagctcgattacttttagtaatgtaaatcagattattgacgtaggaagtgacaacagtataaaatactgagtaagtatgtgtttttataaaagtttggaagtgagattatggcagtgaaaaaagcagccttagcctgcagtgtttgtgggtcacgcaactactcaatcaccgcaagtaagaatcgcactcagcgacttgaacttcaaaagttttgcaaacattgcggtaagaaaacattgcataaggaaacgaggtaaataaagctaatgattaagttttttaagagtgttggtcatgaaatgaaattggttaaatggccatccgcaaagcaaaatagacgtgatacagcaactgttattactagttcaattttatttgcggcatatttaggtgcacttgactggctcttcacttggttgactcaaagattaatgtaattgctactaagtgtataattttttacggtaagttgaataaataattaaaaaagcccaagtcctttgaatttggacttgagctcaaacaaaaagaccagtagtctgatgttaagaacaaaaaacacattagaagctggtcttttatgaattcaattgtaactgaaatcgcaaatattataaagtctgaagataattatattaagcgtgaaagaaaaataatctgtttcttcttaaacctgattaaggaaatcatggccttggctttagctaaagttgatgatgaaatgattaccaaggttaaagcacagggctatcagattgataagaagaatgagcgctcaatcaatatggcttttggcgaagttaggtatgtcagaagaagatatgtctgcccaggcaaacaagcaaggtatcccttggatgaattaatgggctttgacaaatacaagcgctacagtattttagcagtcaaaaacatcttagaagtaagcagcgttgccacttatcgcaatactgctctagcagtcaattgcctgtctggctttaatattagccatatgcaggtgggcaatttggtaaaaatggccgggaaaaatattaaagcgggccaagaagcagattcaagatatgatgccgcaggcactaagaaaaaggtcccagttttgtatcttgaaggcgatggcgtggtgatcaaaggcactaaaagccggttggaatttcatcgctatcaggtctgtgaaggcattgtcaatataagcaagaaacgcagaaagcgaatcaatgccaaggaatttgtttctttaagccgacttgatgcgctgaacgaagccaaggagtacctggccaatacttatgatctttctgatactgtaattcttagcaacgccgatggcggtgctggatatgccaaaacagacttcgatgacattgtagggctatgcaagcgtcatgagcatttcttggatgtctttcacctaaataagaaaatcaaagaaaggctatattttgcgcctgacctgcaaggcaagctgatttctgctttggaatacaaatacagctatgacaaagttaaaactatcctaaccactgcagaaagccgactaattgatgaattgaataccgagctcaatcatgattatctggggcgcctaaggaattatattgatcgtcattgggacgatattaagccgtttaagaaacgaaaactgactgtgactaaagccattggctgctgcgagagcaaccaccgcaagtatacctaccgtgttaaggggcaaggcaagaaatggtcaaaatctggagcagaaggcatgcttaggatcttaagctgcatcaagaatcgagagctggaattttggcttagcagcgagtttgaagattcagaaataactgtattgactgaacaggaattaaaagcagcggcccgtgacagcttaaagaagcgtcatgaagttcatttaggcatccagcatggcgcattaaccgcacaggtagctggcaatagttatttaagcaagctaagcagaaatttaagtcatataaatatttaagaaattaaggttagactaatggtttaaaggctaccgcaaaaacattgacacttactaattgctagcataattagaaattatcagcgattcatgctataatattgacagctaaaagaaaacctctgtgggaggtttttttgtttacctaaaatttaaggagaaaaatatggtcgaaacaacacaaaagaaatggtacgttttgcatacttattcaggctatgaagacaaggttaagtcagacttgttgtcacgtgcacaaagcatggggatgcaagactacattttccgtgtaatggttccagaagaagaaaaagtagaaaccgttcgcggcaagaaacaagaaattgaagaaaagattttcccaggatatgttttagttgaaatggtaatgactgatgaaagttggttcatcgttagaaacacacctaatgtaactgggttcgttggctcacacggtggtggctctaagccatcaccacttcttgatgaagaagtaacgcgtttgcttaagaatcaaggtcaacctgctaagaaaccagtagttaactttgatattggcgaatcagtaactattactgaaggtgcatttaatggcatggtaggtaagattactgatattcaaccagataagtacaaattatacgtatcagttgacatgtttggtcgtgcgactactgctgaacttgattatgatcaagttaagaagcttgacgaaaacgaataatatttagaatttttagttgtaattgtacccaaacgatgttattctaatacggtacgtttattattgtgggaggagaaaaaaggaaaattctccattttaaccgcatcacggaatcaaggaggttttgaccgtggcaaagaaagttattaacgtagttaagttacaaatcccagctggcgctgctaccccagcacctccagttggtcctgcattgggtcaagctggtattaacattgttggttttactaaggacttcaatgctagaaccgctgaccaaaagggcatgattatccctgtagttattactgtatatgaagatcgttcattcgaattcattactaagactccaccagcaccagttcttttaaagcaagctgctaagatccaaaaggcttctggtgaacctaataccaagaaggttggtaaggtaaccaaggaccaagttaaggaaattgccgagactaagatgaaagaccttaacgctgctgatattgaagctgctatgcgcatggttgaaggtaccgctagaagtatgggtatcgaagtcgaagactaatcctgttatttaggtaacaaattaggtgggagagttaagagaagctcgtttgaccacatatacaaggaggaaatcacatgccaaagcatggtaagaaatatttagatgctgccaagaaggtagactcaaataaattatactcagtagcagaagctatgaaacttgttaaggaaacttcatacgcaaactttgatgctactgttgatgtagcttacaacttaagcgtagatcctaagcaagctgaccaacaaattcgtggttctatcgttttaccaaatggtaccggtaagacccaaaccgttgtagtatttgctgaaggcccacaagctgatcaagctaaggctgcaggtgctgactttgttggctcagatgacttggtagaaaagatccaaggcggctggttagactttgacgttgtagtagctactccaatgatgatggctaaggtaggtcgtttaggtcgtattcttggacctaagggcttaatgcctaaccctaagactggtactgttaccatggatatcgaaaaggctgttaagaatgttaaggctggtcaagttgaataccgtgttgaccgccaagcagctattcacactcctattggtaaggtatcattcactgaagaccaattagttgaaaactttgacgcattacgcgacgttatcttacgtgctcgtccagcttcagctaagggtcaatacattaagagtgttgctgtttcagcaacctttggcccagggatcaagcttgatccattaaacttggactaatttaaaatagactattaaaagcctcgctattgcgaggcttttttctattcattgacctattattttcgaacatggtatcataaattgaacttacaaatctatatattaaggataatgtcatgaaaaagcattctattggaaaactagtcattatgttggtgctaatgctagcttttgttacgggctgtgctaataatggttctaaaatcactattgttggttcaagtgcaatgcagcttttagcagaacaagcaggtaatgattatcgcttaagtcatcaagacagcaacattgtcgtgcagggtggaggatcaggtacaggattgagccaggttcaagctggtgcagtccagattggaacctctgatgtttttgccgaaacacaaaagggaattgatgccaagaaacttcgtgattataaaattgcagtagttggtattgttccaattgttaataagggtgtaggtgtgaaaaatgtttcgcaaaagcaattgaaacagatcttcactggtaaattaacgaattggaagcaactaggtggcaaaaatgaagccataactgtgatcaatcgttctaagggaagtggtactagatctgctttcgaagatataattttacaaggaacaaaaccagttaagtcgcaagaacaggactctaacggtgccgttaaaaagattgttaattcaacgcctggtacgattagttacttgtcctttccttatgctcatgataccaatattcaaaagttgagtattaatggggtaaagccaactaacaaaaatattactactaataagtggaatatttggtgttatgagcacatgtacactaagggtaagcccaacaaacaaactaaagcgtttattaattatatgttaggtgaaaaagtacaaaaagatcttgtacctaagattgggtacctcagtatcaatgaaatgaaagtaactcgtaatagcaagaatcaagttacacaaataggaaaatagttcatggataagaaggataaattaaaggaagttgttgatcaagcaattgctagtcaacacgttccacacgttaaattaaaaaagatgggtccgactagtgttgatattgataaattaaccaagccatctaaagagactcatcaagaatattggggcaagggtttaacttacttggcaattgttttgattattgtcttagttgtctcaattatcggctttgtcggctatcacggcttggctacttttgtcagcgatcatgttaatgtcattcactttttgacttcaactgattgggacccgggtgagggcaagaatcatgttggtgctgcggtaatgatcgttacttcgttcttagtaactcttttagcagcattggtagccaccccgtttgcaattgcaatagctctttatatgactgaatattcatctaaaaagggtgccaatttcttacagtcagtgactgaattattagttggaattccgtctgtagtttatggtttcttgggattaactatcatcgtgcctgtgattagaaaactatttggtggaacaggttttggtattttagcagctacgttggtgttgttcgttatggttttaccaacaatcacatcattaacggttgatagcttaaaggctgtaccaagtcattttagaaaagcttcaatggccttaggttctacgcattggcagactatttatcatgttgttttgcgagttgctacgcctagaattttgacggcggtaatcttcggaatggcaagggccttcggtgaagctttagccgtacaaatggttatcggtaatgccgtcttgatgccatacaatttggtcagtccatcagcaacattaactagccaattaactagtcaaatgggaaatacggtcatgggaactttgccaaacaatgcattatggtcattagcattattgcttttaattatgtctttggtatttaatttcctagttaagttaattggaaagaagggacaaaagtaatatggatgcaaaaaagaaagataaattagctacggcgattatctatattttggtaggaattgttgtattaattttggccggtatcctaggtgatatcttgattacaggtattccacatttgtcctggcgctttttgagttctgaagcctcatcataccaagctggtggtggggtacgtgatcaacttttcaattcaatttatttgttaattttgactactattatctccttaccaattgctttaggagcagcaatttatctagcagaatatgctaaagataattgggtgaccaatttgattagaactacaattcaaattcttagttcattaccatcaattgtagttggcttattgggttatttattgtttgtagttcaatttggctttggtttttcaattatttctggtgctttagctttgaccttttttaatttgccaattttaactagcaatattgaagaagcaatcaagggcgtcccacaagatcaacgtgaagcaggattggctttaggattatctaattggaaaactattcgcgggattgttttacccgctgctcttcccggaattttaactggaattattttgagtgcgggccgaatcttcggggaagctgccgctttgatctatacagcgggacaaagtggatcaacagtcaattatgcggactggaatccatttagtccaactagtccacttaatgtaatgcggccagccgaaacattggcggtccacatttggaaagtaaatactgaaggaattattcctgatgccacgattgtttcagcagctacttcagcgctcttggttattgtggtaatcgtatttaatttaggtgcacgttatttaggcaataaattgtaccgcaagttaactgcagctaagtaggtgaaataatgcaagatttaaaacctagctatattaaaacttttgcaaatgatgatttggaattatcaactgaagatttaagtgttctttatggcggtaaggtacaaaaattatttgatgccagtcttcaatttaaaaagaacacgattacagctttgatcggtgcttcgggttcaggtaaatcaacatttttacgttcattaaatcgaatgaatgatcgagtagcaactgttaacggaaaaatctggtttcatggtttagatgtgaataagcctaatatcaatgtttatgaattaagaaaaaacattggcatggtttttcagcggcctaatccatttcctaaatcaattagagaaaatattgtttatgctttgaaggcagatggacataaggatcgggcagaacttgatcgagttgtagaagaaagtttgcgtgcggctgctttatgggatgaagttaaagataagctggataaaagtgcattagcattgtcgggtggtcaacaacagcgtttatgcattgctcgtgctttagctgttaagccagaaattttactactggacgaacctgccagcgctttggatcctgtttctacttctaaactggaagatacccttaagcagttgaggagtaagtatactatgattatggtaactcacaacatgcagcaagcctcaagaattagtgattatactgcattcttccatttaggacatgcaattgaatataattcaacggcagagatctttactaatcctaagggtaagattactgaaaactatattcagggaagttttggataaaatgacaacaataatttcagcaaaagatgtacatctaagttatggcaattatgaagcactgcacgggatcagtcttgattttaagaaaaaagaattaacagctttgatcggtccaagtggttgtggtaaatctacttttttacgctgtcttaatcgaatgaacgatgacatcgaaaacattaatatcacaggtgaaatcaagtttgaaggccaagatatctataattctaaaatggatttggtcagtctacgtaaagaagtcggcatggtttttcaacagccaaccccattcccgttttccgtatatgacaatgtggcttatggcttaaaaattgctggtgttaaagacaaagagctaattgatcagcgggtagaagagagtcttaagcaagctgctatttggaaagaaacaaaggacaatttaactagaaacgctcaagcattttcaggaggacagcagcaaagaatttgtattgctcgtgcgttggctgttagacctaaagttgttttattagatgagcccacaagtgcgcttgacccaatttcaagtagtgagattgaagagacactgatggaactaaagcatcagtatacttttattatggtgactcacaatttgcagcaagcaggacgaatttctgatcagaccgcctttttgatgaatggcgatttgattgaagctggtccaactgaagaaatgtttattgcacctaagaaacaaatcacaagtgattatcttaacggtcgttttggttaaaattttgaggtaaaaagatgcacgaaatatttttggatgaactgaaaaaattaaatacacaatttatggaaatgggtgtcctcgtcaacgatgatattgaccatgctacccgtgcttttgttgatcatgataaaaagactgcgcagtcaatggttgatgatgaagaaaagattcctacagaatcaattaatattcaaaagcaagccttaaaattaatggccttgcagcaaccggtagctactgattttagagttgttatcagtattttaaaggccactactgacttggagcgaattggtgaaaatgctatgagtattgctctggaaacaatcagagtaaaaggtaatcctcgtattccagaagttgaagaaattatttctaatatgacacataatgtgcgacatatgttaattcaagttttaactgcttacgtgcaagatgatgaaaaaatggcacgtgaagtggctagtcgtgatagcatgattgaccacgactatgtaagagctcgtcaattgatcgttgatggaattgaagatgatccttcgcgtgcaatggcttcatcaagctattttgtagttacccgtttacttgaacgaatcggtgaccacattgttaacttggctagctgggtggtttataaaactacgggtgaactagaagaactatctaattcaactgaaagtgaaacgatttaaataaagtaccgtaaaaagcggtgctttttttgtaataaaaaacagttgatacgcgtggtgctagttaaatcgttctagacaatatgccatattataagctaaaatagctatttctagccgctgttgaaagcctactggacttcttgctcgattattctcagcgttgtaataactaagcaaagaaaagtcgctttcaatgctttttctaattgccatcatcgcttactattgcgtggaccttgaagccataataatagactttcttggttgctttataaccaatatcagctacgccccgaaagatcttgacacgataattgcaaacaggctggcaaactggcactgggaaactatcaataatcaaaaattctccagctgtctttacttcttgattccaagcctgacggatacaacgaattagaggcaagagcattcgagctcgacggttaaaacgagaatgagataagccaacgaagaatttacagaatcttcgttgagattcaattccaatttcagtttgccaaatgagcatcgctaagatagaactatcaggaagcttggtctgatcaacatttttacgatgtttaagtccatcaggcgcataaagcttatatagcgagcgacaaatcacatttaaccgattaaaactaacttgtaaatggtgagaaaaacgcttaagcttgagatagttcaattagatcagactcttttctatttaaattacctacaacttttattaactaaaacgatttaactagcaccacgcgtataattaatgaatatttcaaaaactgtattggcgttataccaaacaattattggtgaaaaacagaaacgcttaatcaagacagtagatgcttatttggacattaactacggtgataaagtttatcagataattgatcaagttaaggaacgtaatattccaattttgtcttttggggatatagcagatcaaaacaatacttactcaaactacactgtttttggcaatgatcaagttgacgagatggtggataaaattaatgaaatcatcaataaccaaaataaataaaattatcttttgcattttacagcaaagcttgctataataattaactgtaaattctacctaagactcgggtggcatgacgcctcaaaatcccgccgaggccagaagatgatgaagatttttatgctccatgtctttcggcatggagtttttgcttttttaaggccttatagaatttatcaatgtgatcatggaggtgaaataatttgagtaaagctgctattgctgaaaaagaaaagttcgttgatgcatttgctgaagaacttaaagctgctaaggcaatcttggtaattaactaccttggtttgactgttgaagaagttactaacatgcgtaaggaacttcgtgataacgatgttaagatgaaggttatcaagaacacctacttaagacgtgctgctgctaaggctggtatcgaaggtcttgatgatacttttgttggaccaactgctgttatctacactgataacgctgatgacgttactgaacctgcacgtatcgtttctaagtacgaagatgactttgacgttatcgaaattaagggtggtatgcttgaaggtaagttgacttctaaggatgaaatcaaggaacttgctgctatcccaggccgcgaaggtttgctttcaatgcttgtttctgtattacaagctcctgtacgcgactttgcatatgctgttaaggctgttgctgaatctaaggatgaagactcagctgaataataaagaaatttatatttaatatctaaattctaatttttcggaggatacttaaatggctttagatactgataagattattgaagaattgaagggtgctaccatccttgaattgaacgaccttgtaaaggctattgaagacgaatttgacgttactgctgctgctccagttgctgctgcaggtgctgcagacgcaggtgctgctaagtcagaattcgacgttgaattgactgaagcaggtcaagaaaaggttaaggttattaaggcagttcgtgacattactggtcttggccttaaggactcaaaggaccttgttgatggtgctcctaagaacgttaaggaaggcgtttcagaagacgaagctaacgacatcaaggctaagcttgaagaagttggtgctactgtaacccttaaatagttacagcccaactgggcaactatgaataagctctttgctatgtgcgaagagcttatttttttgtataattaaatttatgatgaaagatatagaaagaagactaacgccatatcaatgggtaatggccattttagctattatttcgatttttttgattattttagattttgctgcggttattaatattgatgaaccgactagtaaatggttctggatcaatagtgcaattgtagtatattttgcaattgattattttcgtggcttacatgcagcagaagacaagaaactatatttcaaaactcacatttatgacttgctgagtattattccaatggggttattgtttatcagcttaaatatttttaatttatctgggctggtatcagatttgcggcatttgcgtttgattcgattagctggtttgatgggaaaattacgtaatatttttcatactaatggcctactctatgtaatcttttttacaattacatttttgttggtaggagcggaagcattcgcaatcactgaacatgtaacgctggatactgctttttggtgggtcatttcaacagcttctactgtcggttatgatgcaatttttggcaaaacaattccaccgcatagtattgtaggaaaattcgttacattagtaatgatgcttttaggaattggaatagttggtatgttaacgtcatcgattacttcgtatttgatgaggagaacgaatggcgcgaatacgttaaaaacgcatgataatattcaattaattttgaaaaagcttgataatttagaaaagcaaaacaaggatttggctgatcaaaacaaaaagatgcaagcacagattaatgaattgaaagatgtacagaatacaacggagctgcataagataaaagaatggtttgagaaaaagaaaggttagttaaaatgagtgaagaaaaaaatcaaatgtattttgcgactgatcctactgccaagcatgatcaacatgttgttgattatcatgtggataatattgatttgaaattcacaacagacgcaggtgtcttttctaaaatgagggttgattatggctcaggcgtattgatcaaggcaatgaaagatgttgtttttcctaaggataatatcttggatgttggtaccggttatggtccgattggtttatttgcggctaagttttggcctgatcaaactgtagatatggttgatgtaaatgagcgtggattaagcttggcaaagcagaatgcacaagttaatcacatagataatgtaaatatctattcctctgattgttatgaacatgtggataatgataaaaagtttggtctaatattaacaaatccgcctattagagcaggaaaaaaagtggttaatgagattttactgggagcaaatgagcatttggttaatggcggtatcttattagtagttattcagaaaaagcagggagaacctagtgcgcgtaagctgatgaccaatacatatggtaattgtgaaattttaacaagagataaaggctattatatcttaaaatcaactaagaaataactaaataaaaaatgcttgaaagtactattaaataagcattagactttataaaagtgctttcaaaactggatttatcctcgtataataatcttgtaaatatcaagagtatgtgaagaggataattattatgaaaaaggcttggaaatacattgttgcagtattgattgtaattgttggtgtgtttatgttaggtatgatttccggtgataacgagactgctgctccagctggaattgctgcattatacttgatcttgtcaggaatctttttctaccacaactttagaaatcgtaacattgaaccattgtaaaaagtaagcagctagtcgcaaatagctgcttttttgatacaataaataaaaacgatgaattgagaagtgataaaatgctgtctggcgaagataaaaggaaatacatgcaattagccattgaccaggcaaaagaagctgaaaagcaaggagaggtgccgataggggcagttgttgttgatcctgatggccgcgtagttggtactggatataacaggcgtgaacttgatgaagatgctacccaacatgcagaaatgattgcgattaaagaagcttgcagtaagttaggcatgtggcgcttaattgactgcagcttattcgtgactttggaaccatgcccgatgtgtgcaggggcaattattaattctagaataaaagacgtttatttcggtgcacttgatccaaaagccggagcttgtggatcagttgtggatttatttagcgtagaaaaatttaatcatcatccgcatgcaattcgtggactgtatcgtgatcaatgtgcacaaatgctaaaagattttttcagagcgattcgtgagaaacaaaaagcagctaaattagctcaaaaagaagtataaaatcagtaatttttaaaacaagatgctggtaatatttactgaaatacgttaacatagttgttgggcaatgtttgacctctgaattgtgtcaggaccggaaggtagcagcactaaggttgttcaggcatgtgccttttttgttagaatattaacagctcttagctcttcgagagctaggagcttttttacttaggaaagagaatttatggcttatcaagcgctatatcgtaagtggcggccgcggacttttgacagtgtgattggtcaagaagcgattaccgataccttaaaaaatgcgattaaacgtggtaaggtttcccatgcgtttcttttcgcaggaccccgcggaactggtaaaacatcttgtgctaagatttttgctaaggcattgaattgtactaatttgcaagatggcgaaccatgcaatgagtgtgctaactgtattgcagctgatcaaggttcaatgccagatatcatggaaattgatgccgcttcaaataatggggttgatgaaattcgtgaaattcgcgataaggtaaaatatgctccaacggaaggtaaatacaaggtatatatcatcgacgaagttcatatgttgtcgatgggagcttttaatgctttgctgaagacattagaagagccaccagagcatgtagtatttattttagcaacgactgaattgcaaaaagtgcctgcgacaattatttctagaacgcagcgctataattttaagcgaatttccaaagaagaccttgagaagagaatgaaatacattcttgatcaagaaaatattaaatatgaagataaagctttagcagtcattgctcaagtagccgatggtgggatgcgggatgctcttagcattttggatcaactgttgagttacgagaaggaaagcgtcaactatgatgatgctttgcagattacaggctttgcagatcgagaaaatattgaaaaaattcttttagctttgttaaatcaggatgcaggtcaagccttgcagtttacacaagatgagttggctaaaggagctagttcaaaaaacattttagatgaaatcatcgatctaactactaagagtttattaatcgtcaaaaccgatgaaaataaacaggaaacttttttaacaaaagactttattgaaaaaataaagagcgtttctacagatagttattatcgattgattaatttggctaataatgccttgaatgatttacgctatactaatcagcaacagataccactggaagtgttcttagtagaagcaagtagtactgcaccagtgcagacaagcgctgccccagctaagacaacaccagctcaacctgcacaaggtaatactgatttgcaggctgaactagcagcgctgaagaagcaagtcgttgatttaacacaaaaacttagtgaagtatccaataagccaagtttatcaacaaatcaggtatttcacttggatactgcggtacctaaagtggctcctaagcctgctgttaaaccaaaagagaagcaaactaaaaagccggttagaaaagtcaaaaaaactacggcagaaaatcgcaaacaagtatatcatgttcttgaaaatgctactcgaaacgatttagagacaattaagaatgtctggcctgatttacaatctgttttagctgtctctgaaaaagcactgcttgatgtattagaaccagtggctgctagtcctgaacaagttgtcatgaaatgcaaatatactttatggtttgaaaatgcgagcgcagataatgatctgttagggcgcttaacagactatattgaaaagtttgctaaacattcttacggcattgttttggtgccagataacgattggctggcagttagaaaagaatttgttgaaagccataaggatgagctacttgctaagaaaaagcaacagattgagattcaagaagaaaagtcagatgaaccagaagttgatccagaagtgattaataaggcaaaggatctttttggggatgcagtcaatattaaagactaaagtactatgagcaatgattataatattaaagttttaaataaagaaacaacattacagatcttactagaagatcataattctttgattcgttttggagatggagaattagatttaattagaggagcaagtattccgtatcaagattatcaaccggaattagctggttcgctaaaagagctcctgttagaaggcagcaatcgccgtttattagtaggattatctgatgtttttgaaaagttagatcgctataatgattattgccgtaatttttatcaaaatagtttcttcccgaataatcatgacttgttaagagaagttgaattgcaatacaatgtatacgtttctactttcttttcacggccatatattgatttagtagataaaagtcacgctaaagattattttgctaaaatgaaacagctttggcaggatcatgatcttttaattgtagaaggtaaatatagtcgctcaggcgaaggcatgacttgttttctaatgctagatcaattagtagactcatttgtccgccaactaatgcatatagtcgcaaaaaagttattgaagatgaaattattaaaaatgcagctaataggttgattttactgatgttaggtcctactgcaaaagtgattgtggctgatttgatagctcagcttaataatcaaatgattgatatagggcacatcgattcagaatatgaatggatgaaaatgggcgtaactaataaggtgaagataccgcataagcatactgctgagtttaattttgatgataaacaagttaaactagagaaagacgacaattttgataagcagattattagtataatagaataataaaggagaaaaattatgagtagaagacctaattttggtggtatgggcatgggcggcatgaacatgcaacaaatgatgaagcaagctaagaagttgcaagcacaaatggcagaagagcaggaaaacattactgctcaagaatttactggtaagtctgccgatgatttagtagtagctacctttactggtgaccgcaagttgaaggacatcaagattgataaggaagcaattgatccagacgacccagatatgttacaagatttggtaattgatgcggttaacaagggcttgaccaaaattgatgaggcaactcaggcaagcttaggtaaatacacgaaaggtttgatgtaattgcaatatccattaccaattgctcatttaattgatgcttatatgaagctacctggaatcggtgaaaaaacggcgactcggttggctttttatacgatggatatgcctgatcaggatgtcgatgattttgctaagtctttagttcaagtaaaaaaagacattcatcaatgtccgatctgtggcaatattaccgaaaaagatgtctgtgatatttgctctaatcctaatcgcgatcaaacaactattatggtagttgaacaaccaaaggatttgatggcttttgaggaaatgggcgaatatgacggactttatcacgtgcttcatggtgttctttcaccaatggatggaattggaccagaagagatcaatatcaagtctttaattacgcgtttgcaaaaaaatgatgctgttaaagaagtgattttggcgcttaattcaactccagaaggcgaatcaactgcgatgtatatcagcaaattaattaagccagctggtattaaggtaaccagattggccgctggtttgtcagttggtagtgacattgaatatgctaattccattactttaaagcgcgcagtgcaaggaagaacggcattataatggctaataaaaagcaagcaaagatcaaagcaatgggtgatcaaaagttggtagccgagattgaaaagctacaaaatcaaattgcattagagcaagatctcgatcaaacaactttagatttatccgaagataattatgtgcaaaatcgaatcttaaaggcaaagtatacttttttgtataatgaagctcgtcatcgaggcacaagatttagtggtattactaatgctattacccagtagaaaaagaccgaatattggtctttttttattttgaataaataaaaaatagtaggactgttaatctctatgaaacttctgtagaatagacatatggaggattttatgagaggttattttgttagttttgaaggccctgatggcgccgggaaaagtacagttttaaaagaagtattgaaccaaattggttcagagcttaagacacaatatcttgtgacgcgtgaaccaggcggttcaaaaattgcagaaaaaattcgcgacattattttagatcctgctaacgacaagatggacaataagaccgaagcgcttttatatgctgcatcacgtagtcagcatgtggaggagattattcgtccagctttaaaggaaggcaaagtcgtattttcagatcgctatgtcgatagttctttagcttatcaaggagcgggacgtgatttaggaattcaggaagttaagcaaattaatgattttgcaacggataaattagatcctgatcttacttttttcttagatcttgatcctgaagtagggttaaaacgaattgaaaagctgcgtccgggtcaggaagatcgtttggaacaagagaatcttgcctttcataaaaaggtttatgccggttttctcaaggtaaaagagacgtatcctgaacgcttcgtaactgttgatgctacgcagccaattgatcaggtagttgctcaagttattgcaacattaaagcaaagaatgccagagttattttaaggattgatttagatgaagttagtaattgcaattgtgcaaaaagaagactctaatgatttacaacgggcctttgttcaaaatgattttcgtgctactaagttagcaacttcaggtggttttttaagtcaaggaaatactacctttttagtaggttgtgatgacgataaagtagacgatgtattaaagattattaaggaacagtcccgagcaagagaggaaattgcaacaccacatatggtttcaactgggtatgaaattacacagcctttgaaagtgacagtcggtggtgcaacttgttttgttgttccggttgatgagtttaaacgcttctgatgattgatcttagtaatgttgggaaaaagcaaacccaatttttaaaaagagcatatgaccaaaaaaagttagctcatagttatctttttgttgatagcgatgaggcacgggcattgaatactgcatactggctagcttgtttgtttaattgtactggtgaaaataagccggatggcagctgtcaaaattgtcggcaaattttgtcaggtaaccacccagatgtattgctagtagcgcctgatggaaaacaggctctagggattgatcaaattcgtcccttaaaagaagaattagccaaaagcccagttgaaagtactcgccgtttcttctttattaatgaagcacaaaagttaactttagctgcagcaaacggtttattaaacttactagaagaaccagtagcgccagtagttacgattttgattactaacaatagtgatcagattttaccaacggtgcgttcacggacccagatcattaattttgacaatggtgagagggctagtggtaggactgcagtcttactggagaatggtttttcaaaagcagagattgaggaactgggtaatcttgataaatggaatcaggcaattaaatatttttatcaagaaatgctggaacacaacagcttagcacttgtcagtgcacataagctagctgctgatgctaagctagtgtcagagcagggttacatcttgcttcagttaaaattattggccgagcaagatttgcgtaatcctgctaaaagaataatggcggcgacaatgcttaagaatttaattgaaatagacaaaatgcgtttgagtaacgtaaatttacaaaatgcgttagattatctcgccttaaaatggaagtaggtgtttagattggatccatattcaaaactgaaaaagattgaagaaacaacagaaaatatgaccaagacgattgccagcttggaaaatgatattttagaaacattaaaagaaaacacggagttgaaggtagaaaatcaattactccatgagaagctggacaagttaacggcaaatcagcctgcacctgagactaaaacgcagagtggcttggaatcattgaagaagatttatgattcagggtaccacatttgcaatatgtactatggctcgcatcgtgatccaagtgcagattgtatgttttgtcttgatattttggacaattttggcgaaaaaaagggcaagaaaaaggacggtagataatgaaacgtcaaagcagttatgcaaaagatgaaggaaagctttatttagtgccaactccgattggtaacttggaagatattactattcgcgctaaaaaagttttaaccgatgcagattatgtagccgcagaagatacaagaactagtgggattttactggaaaaaattggggttcataataaaatgatctcttttcataagtataattccaaggagcgggcgccggaattgatcaagttgatgaaggaaggtgctgtgattgccgagattagtgacgcggggatgcccgtgatttctgacccaggttatgtattagtacaagaatgcattaagcatgatattccggttgtaccacttcctggtccaaatgctttttcaactgctttgattgcttccggttttaatcagccatttacttattatggctttttaccaagaaaatcatcggaacagaagacctattttgcacagatgcgcgataatagagcaacatcaattttttatgaagccccgcatcgtctagcaaaaaacctcaaaacattggctagtgtgctgccaaaagatcgtcaaattgtagctgcacgtgaactgaccaaaatccacgaagagtttatccggggtagtgtggaagaagttacgaattacttcaatgagaatgctccacgcggggaatttgtgattctagtttcacctaatacagaagcgcctcagcaactatcttggacagaattaattgacttagttaatgacttggttgaaaaaggtgaatccaagaaagatgcaattaaacaggtagccaagcagcatcatgtttctaagaatgaattgtatgatcaatatcaccaggattaattatgaagtataccgaagaatatcaaattgaatttaaagattgtgacgaaaatcggcgtttaaaattaccagcactagttgagttaatgatgcaggtttctgagcatcaattaagtcaaggtggtgctgggactgatgacttggttaagcgtggtctaggctgggtcgttactcaatatcattttgagattaaagacctgcctaaaccgggtgatcaagttattctaagtactgaagctagcggctataatcgtttttttgagtatcgtgattttggcgttagtacgcaagacggtaagccattagtgactgtaaaaagccagtgggtaatgctcgacttgaagaagcggcatatggtgccaaccgatactaaaatgatggaagattggggtgcaccactacttaaaaagatgccacgttttccaagattgcgtccgcaaaccgaatacgagcaaaagcgttcataccgtgcgcgttacgatgacttagatactaatcatcatgtaactaatagtcattatttcagttggtttgttgatatgttggatcgtaactttttaaaagaacatattgttacagcaattgatattaaatttgataaagaagttcattatggtgagagtataaattcttgcatggacttggttcaatatgatattattattacatctcatgcaattgaagcagaagatgggacagttaaggccgtctgtgaattaagttggcgtgagatatagtaacaacatgacgctattagttgtttttatttaggggaggaatcggtcaaatgaatacaaagaaaattttacgaacggatttacagcaactagtctttttaggtattgttgttgcaatgaaaattattctaagtcagttttcttttggtccagtaatggttaaagtgggactgggtttcattgggagtgtgctattaggatatctctttggtccgctctggggaacaattggcggtggaattagtgatttaatttcatctgcactttttggcgatcaaggtggctttttcattggttttactttaacagcaatggcaggcccatttatctacgccctgtttttatataataagccagttaaaatttggcggattattgcttctactattctggtgactgtaattgtcaatattggcatgaataccttatggctacatattatgtatggtatcaatttcaatgcggctttgatccaacgtttacctaaggagatgatcgttccttggattcaaatggttatcagctactttgttttacaagccgtttctcgtgttaaaataaaaaagtgatttaaagcgaaaagagaaaaatgtataaaatgaaaattttaagtgtttcgacagctactaatcatttgagcgtggccttgaatgatggtcaacaaattattgttgagaaaaatgaacgagatgagcgtaatcatagcgaacatcttgatccttggattgatgaaatcttaaaagataatgatttaagcttaaaagatattgatcgttttgcagttgctattgggccaggttcttatactggactaagaattggaatcactactgttaagatgtttgccagcattttagataaagaggttgtaggaatctcaactttacaagctttggctaaaggcgttcaagaagacgctttggtaattactggtttagatgcaagaaatgacaattattttgcggccggttatttaagcggtgctgtaccagagaatgtcattccagacggtcattacaatatcgacgttttaattaaggcgattcaagattatgcggccaagcatgaagttaagaaaattgtttttgtgggctcaggtcttgaaaagcaagatgaaaaatttaaagctttgaatattccatatgtttatggaactgaagaagagaatgtcatccatgctgggctaattggacaattagctgaaaatgcggttccagttgatccagataaattattgccacgttacttgcgtcgaactcaggctgaagtagactggcataaaaagacaggcaaaccattcgagccagatagtcattatgttgaagaagtttaatcaatttttccatcaacagttaaatcggattgatatgagttttaccccgtttattgcgaatgtaaacggtaagagactacaaattatgcaagctacagatgacaatattcctgacctgcttgtattagaggagcaagtttattcaggtcggacaccgtggaataagttttcatttgagcgagaactagagaagcggcataattgtctttatttggtagtgtattatgaatcgatgctagttgcatttattggtgcgcgttttactccagaagagacgcatattactaatattgcagtagcgccggcttttcaaaatatgcatattggtcgttacttaatgcaattgattattgatcgggcgcgtgaaaatgacagtgattgcgttagtctagaggtaagagtagataatgagattgcccaaaagctatatcgttccttaggttttgaaggtaccttcattcgtaaaaactattaccatgatactcataccgatgctatgaacatggttttatggttaaaaccacatcagattaaaagaaagaagtttacgttttgagtgaaaaaaatgttcgcattttagcttatgagagttcttgtgatgaaacttccactgctgtcattaaaaatgggcgtgagattgaaagcttaatcgtagcaacgcagattaagagtcatcaacgctttggtggtgtagtccctgaagttgctagtcgtcatcatattgaagtggttagtcagattactaaagaagctttggctgaagctaattgtacttggaaagatatcgatgcaattgctgtgacttatggccctggcttagttggtgctcttttaattggtgtaagtgcagctaaggctgcttcaatggcaacgggtattcctttgattggtgttgatcatattatggggcacattatggcagctcaactaaaagatgagattgaatatccagctcttgcattacaggtttcaggtggacatactgaaatagttttacttaaggatcctgttcattttgaaattatcggtgatacgcgcgatgatgctactggcgaagcatacgataagattggtcgtgttcttggggtaaactatccagcaggtaaaactatcgatgcctgggctcatgaaggcaaggatacctttaacttcccacgagcaatgatggaagatgatgactatgacttctcattctcaggtttaaagtcagcttttattaacacttgtcatcatgctgatcagattcatgaaaagttgaataagtatgatctggctgcaagttttcaagcagcagtaattgatgttttggctcataaaacaattcgcgcaattaagcaatataagcccaagacctttatcatgggtggtggggtagctgccaaccatggcttacgtgatcgcatgagtgcagaaattgctaagttgcctaaagcagaccaacctaaggtgattttgccagatattaagttgtgtggtgataatgctgcaatgattggggctgctgcgtataatctttataataatggtcaatttgcggatttgactttgaatgctgatccatcacttgaattgccatatgctaagagcatgttgaattaaatagaataactttttaaatcaaatacctagaacgattatttctaggtatttttttctactaaggcatggtccttaggatcttttaaatctaaggcgattgattcgtaagcgtcaaataaaatagtgtacttaaaaaccgtcccagttactgttatactgagacggttatttaagttcttttatttacaatttatctggatcttctcttgccacggtaaataagcttcaagggtttccgaatccagaatctcttcattcggtaatttctgaagcaaataattcaagtacttttcaggatcaaggccatttctcttggcagtttcaattaagcttagaataaagccacttgcagtagcaccctcaaaactttgagaaaataaccaattcttccggcccatgacgagtgattttacagcgcgttcagccttattgttagataattctaaattgccatcaagcaagacatgctcaaaagtagcttgatgcttgagggtataattaatggctcttcccaatttagagcctggcaaaacggtgattttatttttctcacaccagttgaagaactcttgcatcagaggcttgagctttgcttgtcttagctggtaacgttcttgtttgctcaaattctcccaggtttgttctaagtaaaacatgcgattgcagtagttgagtccttttggggcaagggacttttcagaagcctgttgtggtacggcttcgtgaaactttcttctaacatgagcccagcagccaactaaagttgctttcggcaattgctcataagcctgccacatatcacagtgcaaataaccgggatagtttcctaaaaagtttaaggcagccttgcaactccgggaaggatcatgatgatagagtgtaatcccgtattgatcatgtttgcctgaaaggaagacccaatagtaagtcttgattgttttactttctaagactgtataataagtttcatcggcatgtaaaattggccgcattaacagcttttgcttaagcagatcatacactggtttaaagtagtattgactgcttttcaaatcccaataatttaacatctgtcttgaaacttctagtcccatcttcttccagtcgctttcttgacgatagtccggcaccttcatttcatatttttgataaagtgaatgagcgatgagtgaagctgaacctagaccatggtttaggggagctttaggtactgcagctttaatgatcttgtcgctaagatttctttgactgcaatatttacatttgtaagcatgttggatatggtctaaccttttaagttgagctgggataaacaataattcttggcgaactgactgcttgcctatctcaatcagttcatgatgacaatcaggacaatgcttgtcgcctaattcatggtgaacctcttcagctggaagggcagctagtaagtcagcacgctttcgtttgtgagcttgtcttttataagtaatagtctgaacggcggcgtcggggacgttctccgtcatcttgagcatcaggttcatcaaagagacttgtttgtccatttaaaggcatttgttctgaagatttgccataacgtttttgcgttaagtaagctacttgttcacggaggagcttaatttcatcagttaagttttgaatagtagttgcttgttgtgcaataatcttttccaaattttcttgtgacatgagttaaacttcctcctaaatttattagttaaaagaatatcaaaaaagcgtgcgatgtcaagtgttagtagaattcgcacgctttcgtgttctttatttttggattgattgcgaagcccttcattagccagtcgacctgctcagaagataaagcttgaacttcattttgattcctgggccagttcaattttccattttcaaatcttttgtagagcagccaaaaaccttgtccgtcccaataaagggctttgaagcggtccttgcttccgccgcaaaagaggaagactttgccgctaaaaggatcaagttcaaactgttctttgactaaagttgctagtccatcaatgcctttacgcagatccgtcttgccgcaaacgatatagacttgccctaagtcactgagcttaatcatggcaagactttctcaagcagcttattcataatttcagggtctaagctgctgtaaaaattcagctctaagtcattcttctttaaactaagcaacagattattgcgtggtggacgagccttcttaggtttagaagaacggccaagtgccacaatgggttgttgtttttcgatcatattcttaacctccattaaattgatgagattagaatacctgaaaaatacggactaaaaaagatactcggttatatgacgcttacattgattccttgcctgcgttacaaattctaaagtattcgctagaaccatctgcgatatatggccccatgtgacgcgtgtcatcgcctgtttttctttcgatatgaattacccgggcaccactatctgcgagcattctggtacaagtagggcctgagaggacgtgggtaaagtcaataacgagcatcccgcttaaaggataaggtttgtttttatctaaatgactgttttttgcttctagctcagcataattaggttctgtcatagttgtgcgctttctattttaaaaagaaaaagctgttcgaagtgaacagctttttgatgagaataaattaattattcacccttgataacttcagtacgtggattcttaggaccttgagccttagaaattacgccttcttcagtcaatttttcgatttgatctggatcataaccaagtgaagctaaaatttccttgttgttttcaccaagatctggagcacgcttgtagttagaaagtgagaatggcaaaccaatagtcttgaacttaccacggttaccaccttggtcgatggttacgatagtaccatccttgttcaagtccgggccattttcaatttcgtgccagtcaagaactggacctacaggaataccagcagcaccaagcttcttagttaattcatacttgtcgtattgcttagtgtagctttcaattaatgggtaaatttcttccttgtgtaattgacggttgtgccagccatcaaagcgaggattagtttcccaacctttagccttgtaagtccgaccgataacttggccaccttcagtgttctcagcacgaggaattgccttgccccatttccagttagggtaaacagcgtagtgaggaagggcacctaagttgtctaacatgatttggttacgcaacttgatacggcagaggttcaatacagcgtcttgcattgactggtaaacaaaaataccttcactggtgtgttcacgttgaagaagggcagctaagataccaatagtaaggtgcatccctgggtttgagtcacctaaagtagcagctgattgagtaggaacgttggctttgccttcgttccaaccagtagcagaagcagcaccaccagcagattgagcaactggttcaaaggccttaacgttttcaaaacgtgaatcttcattgaagcccttcaatgatgcatagatcaatcttgggttcaaagcgtgaagcttttcccaaccaaaaccgttacgatcagctgaacctggtgcaatgttttcaacaaagacatcagccttcttagccaagtcgtacataatctttttaccttcatcagtcttgatgttcaaagtcaaagacttcttgttggcgttcaattgcaagtagtaaagactccatgaatcttgaatatcaagtaattcatttctagtagggtccccagtgttagtacgttcaatcttaataacttcagcaccaagccatgctaaaagttgagtacatgatggaccttattgaacttgtgtccagtcaacaactttaataccttttaaaggtgcatattcattttcttcagtcgtgattaattgtccttatcttcaagttgtgctaaatctaattctgggtttaagttaccaatgtgaccagattccttacccattgattcaggaatttgagcatcaataattgaaggattacctgattcgtaggccttttcaagagcatccttcatttcagcgtagttacttacacggtagctgtcaccaccaaaggccttagcgatttcagcatagtgagcattgtggcttaaaacagtaggtcctaattggtctttaactgggttacggtcaccattgtagataccaccattgttaatgatgacaacggtaacaggtaagtggtaacggcagataatttccatttccattccgtccaaaccaaaggctgagtcaccatgaagtgagatgactttcttaccagtttcaacagctgcagcaatggcataacctaggccgacacccattacgccccaagtaccagtatcaagacggtgacgaggcttttgcataccgattaagttacgaccaatgtccaaagtgttggcaccctcacttacgatgtaagtgtcagggtgcttttgcatcaagttattgataggttcaattgcactgtagaagcctaaagttggcttagcttcagaatcagcgattcttttagcaaatttttcattgttagcttcacaggcattcttaattgaatctagccagtcttgaggggccttaacgttagctttttcaaggggtgcgtttaatttttgtaaaacagaagtaatgtcaccttgtaatggggcatcgatctttctgtttgaatcaaattctgttgcgtcaatatcgacttgaacaaacttagcgtcttcattaaacaatggagcctcaccatttgaaagcatccaattaagccgagcaccgattaataagactacatcggcttgacctaaagtaaatgaacgagctgaagcagctgatgatggtgagtcatctggtacaacgcctttagccattgacatcggcaaaaatggaataccagtcttagtaactaattctctgacttctgcttcacttctagcataagctgagcccttacctaggataatagcagggtgtttagtgttctttaataattcaacagcacggtcaattgcatcatctgatggcaattgctttggagctggatcgactacttcatagatatgagcgtctgacttttgtgcaactgtgtcggcaactgttgcagcaggaaggtcaaggtaaacaccaccaggccgaccgctcatagcagttctaacggcacgagcaactgctaagcccatgtcttcagcacggtcaacacgataagctgctttacataaaggtttagcaacattgtattgatcaagtccttcatagtctccacggtcgaggtcgatgatatgacgatctgatgaacctgagatcataatcattgggaagcaattcttagtggcttctgctaaagcagttaaaccatttaagaaaccaggagcagaaactgttaaggctacaccaggcttgccggtaagaaaaccagcagcagcggctgcgtctacagctgcatcttctcttctaaattcataaaacttcataccctttaattcagctaaacgggcaaagtcagtaactggaatgccgacaccaccatgcatgttgtttaaaccgtttgcttgtaaagcatcgattaaaagtgcagcaccagtaagtgatacatcttgtgtcacgaaaaaaaattctttcaaaaaatccccaaatgcttatgtttatgcatttcaaaaccaagatacacctcttgaattgtatatacaggcacaattgaataataaggtacgttattttaatatgcgcatataaaaataagcaagtcctaatatattagaacttacttattatacttttattcaaaattgtccatttcttcgattgccttttcccaggcagaatttgcttcatctaatttctgttgtacatcagaaagctgttcttgcagtggccccaatttatcaaagcttgaagcaatttctggattggccatttcggtttggatttcttgctctcgttcttcaagctgttcaatttgtttttctgcattatcaattgcacgctgcaactttctcttttgagaatcacgttgcttttgctcttggtaagaaagtttttgctggctaatttgtttgcttggctcgacttctgtctcagcggcactattttcagccatagctgcttgttttgccttctcatcaagataataagaataattgccatcgtagactttagcatgcccatcgcgaactaaaacaatcttattagctagttgattgataaagtaacggtcgtgggaaacaaagagcagggtaccatcaaagtcttttaaagctttttctagtacttcttttgcttcgatatctaagtggttagttggttcatccatcagtaagaagttatcatgttcaagtgataaaacagttaaagttaaccgtgctttttgtccaccagatagttgacctacggtcttatcaatgtctttagctgtgaataaaaagctggctaagattgaccgtacatcgcgttcaggcatggtcttatgacgatccccaacagtatccaatacagttttagatggatctagtctttgtaattcttggtcgtaataaccaatctcaagggatgcgccatacttaattgagccactcttgggcgttaattgcttcataatagtcttaagcagggtagatttaccgattccatttggtccaatgatcgcgacgcgatctcctttattaatctggaaggaaatatctttaaccatggttttatcgggataaccaatcgtcaaatcgttgaaaattaatacttccttgccagaaggatgatcgcttgaaaaatgaatccgtaccttatttttatgtttaggtggagtaatccgctcaattttttctagttttttacgccgactttgtgcacgcttagtggtagttgctcgaaccaagtttttttggataaattcttcatcttttttgatttcagcttgttgcttttcataagcggcttcttggtccttatcacgttgctcgcgctgcatgacataggctgaatagttgcccttaaaagcagttaatttaccaaattctagttcaaaaatttgggctgctaaatgatctaagaaatattggtcgtgggaaaccacgaggattgcaccactgtaattctttaaaaatccttccaaccaatctagggtatctaaatctaagtagttagttggctcgtccaataacaacagagcaggtttgcgcaaaagcaacttaacaaaagctaaccgtgttttttcaccaccggataaactaccaatcttcttttgccaagtgtcttcaggaaacttaaagccattcaagatacttttaatatcagattgataagtataaccgcctttttgttcaaagttgaattgcttttgatcgtattgcttaagcaattcttgatcttcaggatgatctgcaattttttcttgtagttggactaagctttttctttcccttattaaaggagcgaaaacggtttccatttcatcccaaatggttttattttcatctaatgcattttcctgagcgatataaccaacatcaatgcctttattaactgtaaattcgccgtgagttggttcttgctcacctgtcattatttttaacagggtagtcttaccaaccccgttaggaccaactaagccgattctggcattggaatcgattgaaaaattaacatttttgaataatgtgttggccccaaattgttgttctaaatcgtgtccttgtgcaataatcataatttttcacctaaccactattctaccatatagcgcaaattgtttgtttttaagttaaatatgtgaaaaaatgatgatttgtgaaaaagatacttgcataagtactatcatagcaggtatgatagtagtgcttgattgtacattcacaaacatttaagtttggagggttcctatatggaaaaaataaaaatcccaaaagcaacggcaaaaagattaccattatattaccgttatttgattattttaaatgaagaaggcaaagataaggtttcttcaactgagctgtcagaggcagttcaagtagatagtgcttcaattagaagagacttttcatattttggtgcgttgggaaaacgtggctatggatatgatgtaaagaatttattgagcttcttcaagaaaattttgaatcaagatactttaactaatgttgctttaataggtgtaggtaatctgggacgggcgctgcttaattacaactttaagcgcagtaataatattcgaatttcctgtgcttttgatatcaataaggagattactggtcgtatcttaagtggtgtccctgtttatgacatggacgacttaaagcaacaactaagtgatcaacagattacaattgcaattttgacagttccttcaacagctgctcagaaaaccacagatgaaatggttgatgcgggtgtaaagggaattatgaactttactccgattcgtttatcagctccagctgatgtgcgagtacaaaatgtagacttagcaaccgaattgcaaacgttgatctatttcttagatagtgacaaagaaaactaaatttgagtaaaagaaacatactaacctagtgttggatcatgaatcgacggattcacgatctggcactttttattttgtctaaaatagaaagtgaagataaagcaaatcaagtcttcagctttttagacacttgatgtcgtaaaagaaacggactgctttaccacctattcttaagtctcttcgaagtctgtgggcacttagatgccgtgtttagaaaattagaattaataggttgataaagaggtttatcttcacagcggaggttatattatggaatcacaaattattttcggtattgatgttagcagtaaatcttccacagtttgtgtggttaatgaccggatcaaacaaggcgaatcttttagaatctctaatgattcctttggctatcaaaaactttatgagcaactgaaccaatatttgataactcctttagttgttttcgaagctactggtgtttattctctaagcctgcaagctttcttagaggattatcatattaagtatttgaagcttaatccgcttaaagcgaaaaagctaatggacaataatttacgccataataaaactgataaggtagatgcttatcgcctggctttaattcaatttaatgccccgcaaaagctgcgtgatccacagcccagagagtatcatgaacttcagaatgccagtcgctattatgaagaacttactaggagtatagttactactaaaaatcaattgcaccgcaacctccaatccactttcccacaaattgaagaaatactgtctcatccatctggcagaatttattgggcgcttgttagtcttttcccacatgctggatatgttctagaaaagaatgagacacaggtaactcaaatgcttaattctatttctggaataggacaacaaagggcacggtacttaaccacaagattatacgcttttgctagagaagcttatccttatgattccaaagatagtattatcgttagagctattcaaaggaacatttctaatttattttcactccagcaagaacgcgactatgtaattaactacatggaaaagctggctaaagcagtaaacgctcgtgctttatccatctatttgagtatcccaggggttgctagaattacagcagtgagattagtagcagagctcggtgatctaagacggtttagcacttcagctcaaattgatgcgtttgttggcattgatccaggaaggtaccaatctggtgaaaaagacagttctcttggcattaccaagcatggcaatcatattgccagaaaaatactttatcgagttattactcaaatggagacggtaaaggctacgcagccttgccatataactgattattatgacaagaaaaaacgatcttcaaatagacaaggctataagaaaatcgccattgcatcagtccataaactgatacgcacaatgtttgctcttatcaaacatgatcaattatatgattacaacatagccaccgaaaataaaagactttagctgaaatcaaataatcaacttaagtataagcaacctatggaaaaactacaagtattcataggcttatttgtggtactttcgctttttcttaaatttaaactcttatttgctttaaccttattcgcatcattaaaacaagtaaatttattttcttaaatcattgataatacttgactttgggtagaaaaaagccgattttcggctttttttcatgcagttgtttcacttttgattaatttgacaggcaaaatataattcttttggcgcaatttttcgtcgggattggaaattcgggtaagcaataacttaaccaataaagttgcaatatcatgaattggctgagcaattgtggatagttccgaatggtaagtttgaatttgctttgttccgtcaaaaccaatcacttttaattccttaggcactttaatgcctaatttttttgcttcttgtaaaactaacactgcagttaaatcatctgtgcagacgacgccatcaggctgatcattgactaacatatcatgaattttcatatttttaatgttggaagaatcagaaaaagcaactgaacgaatgtgggctgaaaagtgacattcctttgcttcatcaagataagctgctagtcgttcgtcagtcggattaccttttctgtgttcattgcccagaaagtaaattttgtgacaaccagcttgaaccaagtcatgtactgccaacttgatgccttgataattatcacaactaacaattggaacattatcagatagctttcggtcgaaagagacaattggcaaacctagttgttggtattcattgatacctagattgtgcgcaccagcgatgatgccatcaacttgattagcctgaagcatgcgcagatattcgcgttctttttctttgttttgtcctgcattgcataggattactttatagttttgttggaataaagtggtttcgatatcctgtactaattccgcaaaaaaaggattagtgatctcaggaaaaatcaaaccgactaatttcattttctttccttgtaatgagcgggcaatagaattgggacgataatttaattcccgcattgcggcaaaaactttatctttagttttttgacttaaatagccatggttgttgattactcgcgaaacggtagttacagagcaaccggcttttttggcaacgtcgcttaattttgctgccatagtatcacctgatgtttaaagaattgtttgcatttgccaaagcttgccagtgtagtcaatgtcttgagcaaacgcaatttttttgttggtctgatcggcaaagtagcgtccagtcaataccttttcaccatcattaacgaatacttcaattaatgaatgatcaacaaagatatcaagcttgaggtcatgatttggtgaaagcgtaatagctcgactttcgccataatcaactgctactttttgcccagcatgagcacgatctaatactaatttaccatttttggtatcgaaattgagctgtaaactgttacttaagtcattatttgcagctaaatgtaaagtgccactttggttagccttaattgttaattcaagttcaaattgttggccggcttgatcgctgactacttgattagatatgcttgcttcgtttttgcggatactgcttattgccttaactggcgtttgaattaacttgtcactctttaggtggagttccttcacttgactcaagcagttagcccagttttcatcatcagtagggtaagtagtgtcaggcaagccaacccaactgacttcgtaggcattaccatctggggcgttaaaggcctgagtggcataaacatcgaacccgtgatccaaattgtgtaatttacctggattaattaacttatgattttcccagtcaatatcatcagcaataacgtacatatttgggtaaatgtcatcataagctgctacttttttgtctaaaccctgaggacagaaaatgaccacgactttgccatcaacacggacgatgttgggacactcgatcatgtagcccatgtcttcgttggtaaagtctaagaagcccaattcttcccagttctttagatcctgagacttccaaacgtcaatgtgaccgtgtttttcctttttatcttgggcacctaaaattgcgtagtaagtgtcattttctttgataatttggggatcgcgaaaatgttcggtgatgtgatctggattcttaaataggatggttttgtctgaaactttattatttttatccatccaagcaccgatttgataaggagtacgtacccaattttcatcgcggtggttaccggtatacatgatgaaaagcttaccatcgatttcgcgagcagagccagaataagctccatgtgaatcagccattgtgtctggttcaatacctaagcctaagttttcccagtgaaccatgtcagttgatttgaagtgccaccatgactttagaccgtgaactgcgccgaatggatatgattgatagaagaggtggtaagcaccatcaaagtaggaaaatccattagggtcattaattaagccagaaataggatgcaaatgatagcgcatttggtaaggggagtttgcggcttgtgcttgcaaatgcattaatgtatcagcgtcccaatcttgataaggtaagtaacgtttttctcttgtccattccataaatatacctccatgaaagcgttgtctttttacatgtattttaagttagtatgaaaaatatgtcaaacgtttaacagaaaaaataattattaattcataagtaataaaataaataaagaattttatgtcaaacgattgacatattttttgaatgcgttatcataattagtgaattgagaataaaacgtttacataggagggatcaatatggaccacagaaaagtggctgaacgagtaattaaagacgtcggccgtgacaatattattgccggtgcccactgtgctactcgtctgcgtttagtattaaaagatgattcaaaagtcgaccaaaaagcattggataatgatccagatgttaagggtacttttaaaaccaatggtcaatatcaagtaattattgggccaggagatgttaatgacgtttacgatgagttcattaaaatcactggtttgaaagaattatcaaccgatgatttgaagaaggttgctgcagaaggtaaaaagaagaatccagtaatggatttcattaaacttttgtctgacatctttgttccaatcattccagccttagttgctggtggtttgttgatggctttgaacaacttcttgacttcaccaggtctgtttggaccaaagtcagttgttcagatggtaccgaatgttgctggtatttcaagtatgattcaagttatgtcagcagctccgtttatttttatgccaattctagtcggaatgtcggcagctaaacggttcggtgctaaccaattcttgggtgctacaatcggaatgattatgacgacacctggactccttggtgcaaatcacttctgggacatttttggcttgcatgttgcgcaaactaactatcaataccaggttattccagttttagtagctgtttgggtattgtcaattttggaaaagtacttccacaagcacttgccatcagctgttgactttacctttacgccacttctttcaattatgattactggctttttgacttttacaattattgggccagtcttcaaaggcgtatcagatggtattaccaatgctatcgtttggctatatgacactactggtgcctttgggatgggtgtctttggtcttacctattcagctattgttactactgggcttcatcaaagttttccagcggttgaaactcagcttttagcagcctttgctaagaatccagccagctctggtgactttatctttgttaccgcatgtatggctaacgtagctcaaggtgccgcaactttcgctgtttacttcttaactaagaacaagaagatgaagggcttggctagttcatcaggtgtttcagcacttcttggtattactgaaccagcacttttcggtgttaacttgaagtataaattcccattcttctgtgccttaattggttcaggtgtagctgctgcttttgcgggcttgatgcatgttactgcagccgctcttggttcagctggtttcttaggcttcctttcaatttatcctaagactattccaatgtgggttgtttccgtattaattagttttgctgttgccttcatccttacttatgtttatggtaagggtcatttgaaggaagaagttgctgaacaagatgttccagtaaacgacgcaactgattatgctgaagaaactcaaaaggctgaaaagcttggtaaggaacaaatggcattaaaggatgaagttattgcttcaccagttgatggtactcctgagagtttaactaaagttaatgatcaagtattctctgctaagttaatgggtgatggtgcagccgttattccaagtgatggtacgatctattcaccagttactggtactgtgactattgcttatgaaactaagcatgcttatggcattaagtcagacgatggtgcagaagtattgattcacattggtcttgatactgtaaaccttaagggcgagcacttcgaaagtttcgttaagcaaggtcaaagagttaacaagggcgataagcttggtacagttgaccttgatgctgtgaaaaaggcaggctatgatactactgtcatggtagtaattactaacactgccaactatgcaaatgtttcaagaattactgatgcgggtgacaagcacggcgacaagttgattgctgttactgcacacaattagtttcttctactcctctagaaaaaattaaaacaattagaataaaagacgctaagaaagattgtttcttggcgttttttagtactaagtgttgcacttcaattttaagtttgagtaaaatgttctctataaagaaaaacaaagtgagggtatgttttatgaagttaaaaagtggagttattggagtattagtaactggattaactgtctttagcattaatctaactagctctaaaataaaggcagcgataacagtgcctaatcctaagacagattatgtagttaaaactacttctaatgtgtataagagtaatggtaagaggaccagttttaagacacgtggtcagatacaaaccggtaatgttccagtaattgaatcacaactatatgaaggcaagttcattaatgtgcaaggaactaagacgattaatggtactgcttattataagatcggtcctaacgcatacattaaacaaaataatgttttaaattatgctcaagaaaaagcaaagcttgaggcatatcaggcacaagatgatgtgaatgatgattcagatcagtcaacagaattaagctctgatgatgtgaattttgacatagcttggtatgacaacattaatgaggatccatctccagcgatgttcgatgattcaggatatcataatagagtgattaagaatgctcgtaaattattaggctatttcacttatggaacaggtgcataccaaactaattttggcagttggcgtcatcctaataaaaacggttcaactgattgttcaggatttgtgtggatcgtaatgaagagagcaggatatcgtgtaggaaatgctccattttttactctgccaatggaacgagatgctaaaagtactcatggctatttgaagaaaatttctgccaagaatattcgcccaggtgatattgtgattgttaatactggcaatggtgttggtcaaaacggacatgcagcaattgttgatggcaaatatgatggttgggacacgcaaattattgaagagggcggcaacttaggtgtagatgatgtgcaccgctctagtttaggtagctcactgagcgataagctggccaaaggtcgaatcacttatgctcgccccgttaaatagtatgctctatgctataattttgctaatcaataaaggataataagaatgaaaaagaacagcacgcttaaacatgtctggattatgacggctgtctattgggtagtaggtattctaagtattttctggggtaagcttgatcatacttttgcgtctcaattaaaagagatcaataatatttacgtgttagttttaataattatcttaagcttgccgctacttttatcgctgttattgtcggttaaagtaaaaatgccacgtttgatctgcaatccactagttgctgtaatttatctattagtggtaattgcagcaggtgtagcatataacttacaaaatattattggctacttcttcccaatcatcctcttcattattatggcgctagttgctgttttctatgctttgattaagacttttagcagcagaaaaagtggtaaatatttttttattgatggtaaagataagaaagaatgccatgatttctgggatgcttataagaagtactatgtaatgggattaacttacggcattattgatggtttgattactgtaattagttaaaaaagttaagaaaaatcaaaattagcactcaattgaaaaaagtgctaattttttcttgctttttttcacaaaacagtttattatcatatttgtaagttagcacttagcaaataagagtgctaatgattaatacagtaataaaaaatataatgaagaaaattaaacataagggggactaaacgtgttacaaccaattggtgatcgcgtgatcgttaaagttaagaaagaagaagaagaaactgttggtggcatcgttttagcatcaaatgctaagaagaagccaactgaaggcgaagttgtagctgttggtgaaggtgcttacgcatcaaacggtgaaaagattccaatggctgttaagaagggtgacgtagttctttacgataaatactcaggcactgacgttgaatacgaaggtgaaaagtacttagtccttcacgaaaaagacattttagctattgctaagtaatttagttaaaatttccaacgataattaagtaaattaaggagcatagataatctatggcaaaagatattaaattctcagaaaatgcaagacgttctcttttaaagggtgttaataagttagctgatactgttaagactactattggtcctaagggtagaaacgttgttttggaacaaagttacggcaaccctgacatcactaacgatggtgttaccattgcaaagtccatcgagttaaaggatcactacgaaaacatgggtgctaaacttgttgctgaagctgctcaaaagactaatgatattgctggtgacggtactactaccgcaactgttttgactcaagcaattactaatgaaggtatgaagaacgtaactgctggtgctaacccagttggcattcgtcgtggtattgaaaaagctactgaagctgctgttaatgaattgcacaagattagccacaaggttgaatcaagagaccaaattgctaacgtagctgcagtttcatcatcttcaaaggaagttggtaacttaatcgctgacgctatggaaaaggttggtcacgatggcgttatcactattgaagattcacgtggtatcaacactgaactttcagtagttgaaggtatgcaatttgatcgtggttacttatcacaatacatggtaactgacaacgataagatggaagcagatcttgataatccttacattttgatcactgacaagaagatctcaaacattcaagatatcttgccacttcttcaagaaattgttcaacaaggtaagtcattattgatcattgctgatgacgttactggtgaagctcttccaacacttgtattgaacaagattcgtggtaccttcaacgttgtagctgttaaggctcctggctttggtgaccgtcgtaaggctcagttacaagatattgctgctttgactggtggtactgtgattactgatgacttaggtcttgaattaaaggacactaagattgatcaattaggtcaagctcgtcgtgtaactgtaaccaaggactcaactactattgttgacggtgctggttcaaaggatgctattcaagaacgtgaagattcaatcagaaagcaaattgaagaatcaacttcagactttgacaagaagaagcttcaagaacgtcttgctaagttaactggtggtgtagctgttatccacgtaggtgctgctactgaaaccgaattgaaggaacgtcgttacagaattgaagacgctttgaactcaactcgtgccgctgttgatgaaggttacgttgctggtggtggtactgctttagtagacgttgagaaggctatcaatgatcttaaggctgatactgcagatgaaaatactggtatccaaatcgtattaagagctttgtcagcaccagttcgtcaaattgctgaaaacgcaggtaagaatggtgaagttgttttgaaccacttactcaagcaagaaaacgaaattggctacaatgctgctactgatacttgggaaaacatggtagatgctggtatcattgacccaaccaaggtaaccagaaccgctttgcaaaatgctgcttcaattgccgctcttctgcttactactgaagctgttgttgcagaaattcctgaagaaaagccagctaacccagctccacaagctggtgcaccaggaatgggtatgtaattatatatcttaatgctttagcatttagatatataattcttgattacgaagtaatcaagttcatttacagtgctttagcactaaacttatgcacaaactctcactctagttcaaaaacaaatataattaaaatgacttcgaagttaaacaatcagttcagcttcgaagtttttctttttgtagcgtataatattgtacgtaactctatctaaaatacgaaataggaaagagacataaatgacggaaaaaacaactccaatgatggagcaatattacgaaattaaaaaacaatatcctgatgcctttcttttttatcgcgtcggagacttttacgaactgtttgaagatgacgcagttaaaggtgcacagattcttgaattgactttaacgcaccgatcaaatagaactaagaatccaattccaatggcaggtgtgcctcatatggctgtggatacttatgtaaatactttagttgaaaagggttataaagtagcactttgtgaacaacttgaggatcctaaaaaggccaaaggcatggttaaacggggaattattcaattagtgacgccgggaaccatgatgaatgaaggcccaaatgatgctaaagattcaaattacttaacatcagtaattaccactaagagtggctttggtttagcctacagtgatttatccactggtgaaatttatgctactcatttaaagagtttcgatgctgtttccaatgagctcttgtcacttcgtactcgtgaagttgtgtataacgggtcattatctgaacaaaataaagactttatgcacaaggccaacattacgatttctcgacctactccaattgaaggtgaacatgctgaaatttcttatgttgaacagaatttgactaatggggctgaaaaagaggctacccgtcagttagttggctatttgctttcaactcaaaagagaagtttagcgcacttgcagattgccaaaagctatgaagtaaatcaatatttgcagatgtcacatactgtgcagaataatttggaattggttgcttctgccaaaactggcaaaaaaatgggttcacttttctgggttttggataaaacacacactgccatgggtggacgcttgcttaagcagtggctagctcgtccattattaaacatggatgaaattaaccatcgtgaagaaatggtgcaggccttgcttgatggctactttacacgagaaaatgcagttgatgccttaaagggtgtttacgacttggaacgtttaactggtcgaattgcttttggtaacgttaatgcgcgcgaattactacaattatcacgttctttgcaggccgttccagttattttagatgctttagagcaatcagattcagatatcttggtcgattttgctaaaaaaattgatccattaaagggcgttgccgaaatgattacttccactatcgtgaaggatccacctgtgttgactactgaaggtggcctgattcaaggtggggttgatccgcagcttgatcgctatcgggatgccatgaacaatggaaaaaaatggttggctgaaatggaagcagatgagcggcaaaagacaggtattgataacttaaaggtcggttataacaaggtctttggctattatattcaggtttctaacggtaacaagtctaaggtgccacttgatcgttatacgcgtaaacaaactttgactaacgctgagcgttatatcacaccggaactcaaggaacatgagaatctaattcttgaggcacagacacggtcaactgacttggaatatgatttatttgttaagctgcgtgaggacgttaagaagtatatccctgctttacaaaaattaggtgggcaactagcagcgctggatgtttattgtggttttgctacagtagctgaacaaaataattattgccggccaacttttcacgcagataatcaagatattaatgtgactaacggccgtcatccagttgtggaaaaagtaatgacggctggttcatatattcctaacgatgtcaaaatggatgaaggaaccaacatttatttaattacaggtcctaacatgtctggtaagagtacctatatgagacaaatggctttgattgcgatcatggctcaagtaggttcctttgtgccagctgatagtgctgatttgccaatttttgatcaaatttttacaagaatcggagcagctgatgacttaatttcaggtcaaagtacctttatggtagagatgagtgaagctaatgaagccttgcagtatgctactaagcgcagtttggttctctttgacgaaattggtcgtggtacggctacttacgatggaatggctttagctggtgcaattgttaagtacttacacgacaaagttggtgctaaggcattatttgctacgcactatcatgaattgacagtgatggatgagactctggatcatctgaaaaatattcacgttggtgctaccgaagaaaatggcaagttaatcttcttgcataaaatcctacctggacctgctgatcaaagttacggaattcatgtagctcaattagcaggtttgccgcgcaacgttttgcgagaggcaactaaattattaaagcggcttgaagcacaaggcagtgaactagcaccagtttcgcagcaattagatttatttgcagagcctgtggaaaacagtgttgaagaaactgaaacacaaaatgacaagcccgcaataactgatgcacaacaagatatacttgatgatatttctaatctttatttagcagataagacaccgttgcaggttatgcaaatggtagctgattggcaaaaagatttaaaggatgacgattaatgagcaaaattcatgagttatcggaaactttaactaatcagattgcagccggagaagtaattgagcgcccagctagcgtagttaaagaattagtagaaaactcgttagatgctggtgctactcgaattcgcgttgattttgtagatgctggtttgaaacagattgtagttcaagacaatgggacggggattgcacgtgatcaagttgatctagcctttacccgacatgcgacaagcaagattgccaatgaacacgatttatttaaagtttccactttaggcttccgcggagaagcattagcttcgatttctgctgttagccatgtggaaattctgactgcaactgaaaacgcaattggtattcgagctaactatagtggaggcaataaaaaaggccaagaagatgcagcggctcgtaagggaacaaaaattacagtcaaggatttgttctttaacacgccagccagattaaagtatttgcgtagttcaagaactgaaattatgaagattgtggatattattaatcgacttgcgttaggttatccacatgtgtcttttactttgtcaaatactggcaaaattttattaagaacgccaggaaataataatttaaagcaaacagttgctaacgtgtatggccgtcatatcgcagaaaaaatggaaaaatttgaggcaaaagacagcgattttaagattacaggtctgatgtctaaaccggaattaacacgttctacacgcaattttatttcgattctcttaaacggccgctatattaaaaattttcaattaaatactgcgattctggatggctatggctcaaaattagcagcgcggcattatccgattattgtgttagcaattaaagtagatcctttgttagtggatgttaacgtgcatcccactaaacaggaagttcgtttatccaaggaaaaagaactgggtcgtttaatcaccagtgcaattagtaatacacttgtggaaaaagttggacaaattagcgcttttgctaatttggaaaataaacgtgatacgctagttgatcagcttagttttaacttaaatcaagatgttgtaaatacagctcgtaaaaaagaaccggaaattcgcgaacaagaaaagccaaaatttttaacgattgaatctgatgattcagaagataatattcaaaatgaggcggtaaagcaggatagtgaaaagaaatatgttgatcttaatcagccacgtgaagatgatcaatatatcgttactaagacctggaaacaaaatgttgctctgcagcaagcactaacgccatttcctacaactaggactaatcaggaagtcatttcaagtggggatgaaactttagctaataatctgcctcgcttggtttatgttggacagaccgatacttatttatttgcccaacataatggcgacctatttttaattgatcaggttgctgctagacgaaggttaaaatttgagcaaatttttcacatgataactgccaaaaaagtagtacaacaaggtttgttaacaccaattattttagaatttggtaatcttgattttatgcaaattaaggatcaagtagaacagattaagcaggttggaatctatttggaagattttggacaaaatagttttattgttcgttcgtatccaacttggattcacgataatgtcgaagattcaattcggaagattttagatggttatttgaatgtggataaaggaaaggcaaagaacctgtttagccggatagcagcaatgcaagctaagcgagaaattactggcaagattaaattatctgcagctgaagctgagcaaattttacttgatttacgcaagtgtactgatccatatcatgatgcagatggacggataattttggttagaatgagccaaaatgaattgagaaaaatgtttaagaaggatgaataatgtacgaatattttgaaggtgtgattactgtggttacaccaagctatgttgtagttgatgtcgggggcgttggctacaaggtctatagtcctacaccttttgcctatactcaaggccaaaaagctaaggtctttattgagcaagtggtgcgtgatactggcattactttatatggttttcaaagtcaagatgataagggcttgttcttaaaactacttagtgttagcgggattggtcctaagagtgcaatggcaatcatggcagctgaggatagtaattctttggcggaagcgattgaaaaaggtgaagttaagtacctaactcgttttccaggtgtgggtaaaaagacggcttcacaaattgtgcttgatttgaagggtaaattaggtgattatgttgctcggcttgatcgtccagacaatggtgagaatgtgccgccagcattaaatgatgcactgcttgctttaattgctttgggttatacccaaaaagaagtggatcggatcacgcctaaactggagaaagttgctgcaaatactgcagatcaatatattaaaaagggcttagcattactgcttaaaaagtagatcttggtataatagaacagatgattattttttaaggaagtgaaactggtggcagaagatcaagtaacttcaggtgatattgagaatcctgaagaacaacaaatggaactttctttgcggccgcaaacgctcgaccagtacttaggtcaaaagcgggtcaaaaaagaaatgagcatttatattaaggcggcgcgccaacgtgatgaagcattagatcacgttttgctttatggaccaccggggttaggaaagacaactttggctttcgtaattgccaatgaattgggagttcatttaaagagtacaagtggtccggccattgaaaaggcaggcgacttggtggcacttttgtccgacttagatcctggggatgttttgttcattgatgaaattcaccgtttagctaagccagtagaagaagtactctactctgcaatggaagactactatatcgatattgtgattggcgaggggcagactactcatgcagttcacgtgccgctgccaccatttactctaattggggcaacgactttggctgggcaattgtcagcacctttgcgtgatcgctttggcatcgtagagcacatgcagtattacactatcgatgagctagaacaaattgttttgcgttcaagtgatgtttttcacacttcaattgcgcctgaggcggcccatgaattggcacgacgctcgcgtggtacacctcgtgttgccaatcgcttacttaagcgggtgcgtgattttgcggaagttaagggagaaaaaacaatttcgctcgagactactgaaggcgcgttaaaacaattgcaggttgacgatgagggacttgatcagacagaccgcagattattgagaacgatgatcgaaggatataatggtggtcctgttggtattcggactttggcagctaatgttggtgaagatatggaaacgattgagtcactatatgagccatatttgttgcagcatggttttattttactcacgccgcgtggcagaatggtgacggataaagcatatttacagttaggattaccaattccaggtgataaatagtcccattttctgtataatggttataatatctagaaaataattttaatgaggtggaaattttgaacattttatttttagcaaatgccggtgctgcagcaagtagcaactggatgatgatcggtttatttattattttgatcgctttcacttactttggtatgattcgtcctcaaaagaagcaacaacaacaaagaatgcaaatgatggacaaattgaagaagggtgacgaagtcatcttagttgatggtttgcatggtaaggttgacaagatcaacagtgataagactatcgtggttgatgcagatggcatttacttaacttttgaaagaatggctgtccgtcgtgtgattccagttgctgcaccagcaactcctgcagctgaaactaaggctgaagctccagcagaaaagccgaaagaaaaagcagacgaaactaaaaaagaggataagtaatcatattacttaagagcgtcattttaggcgctttttgttttgctaaaaaaatccttgttgtaaaatagaagtgataattttagttcaaagaaagggatctgaaatgaagaatattcccgttgtaatgattctttttggtggtagtggtgatttggctcaccgcaagctttatccagctttgtttaatttgtatgaacaaggcttaattcacgacaactttgcagtaattggaactgctcgtcgtccttggtcacatgagtatttgcgtgagcaggttagtgatgctattcatgaaacgcacgatactgttgatgaaaatgagttgaaagcttttgcaagtcatttttattatcaatcacatgatgtaactaatgtggaacactatgagattttgaaaaacttggcacaagagctcgatgatcgttatagtgcacaaggcaatcgtctcttctacatggctatggcaccaagattctttggcacaatagcaacgcatattaatgaccaagacttgactggtagtggctttaatcgaattgtagttgaaaagccatttggtcatgatttggcttcagcagaggaattaaataagcaaatcacggcttcatttgatgaaaatgatatttttagaattgaccactatttaggtaaagaaatggttcaaaatatcatgccaatgcgttttactaacccaatggttcaaaatatttggtgcagcaagtatattaagaatatccaagttaccttggcagaacgtcttggcgtggaagcacgtggaggttactatgatacttcaggtgctttgcgtgatatggtacaaaaccatatttttcaaattattactctgctagcaatgccagaacctaaggatctttcttctgctagtgttcaccaagccaagcaagatttgcttaagagtttaattattcctacgccagatgatgtcaagaaatactttgttcgtggtcaatatttgggtagtgatactacttttgcttataagcaagagccaaatgttgatccagagtcaactactgaaaccttcgttgcaggtaaagttaagtttaatgagggaccaattgctggcgtaccaatttactttagaacgggtaaggaatttaaagaaaagaagaaccggattgacattgttttaaagcatattaataatccatatgggcaagctcattctaacaatattacgatcgtgattgacccaactagtgaaatttactttactattaatggcaaacgaattgaccaaccaggaattcgccgtgaaaacttaacttatgaattttcaaaagccgaaatggctaaggtacctgatggttatgaaagattgcttcatgatgtttttgtcaatgattcaactaactttacgcactggagcgaattgaagcgttattgggaatttatcgatgcagttgaagatgcttggcagaaggaaaatgaagcaggcaatccagccattgcacaatatttgccatacagaatggggccaaaggaagctaatacaatctttgagtcaccaactgaacattggatttatgaataaagaaaatttattaccgcaaaatgacatccatcgtcggattattcatctggacatggatgctttttatgcttcggttgaaatgcgggagcatcccgaatggaaaaataaggcattgattgttgggcaagatccacgacaaaatggtggacatggagtagtggctacttgcaattatgtagctcgtaagtatggcgttcattcagctatggccgcaattcaagcagtacgtttggttcccaaggagctaatagtttttactagaccacgatttgataaatatcgtgcagtgtcagctaaaatccattcttttatgcatgatgtgacagatcaggttgaatcagtggctttagatgaagcttatctagacgtgacacatccaaagatagagcaggagtctgcagttcaaattgctttagatttacagaaaaggattcggcaagaagtaggcttaaactcgtcttttggcgtttcctataataagtttttagctaaaatgggatcagaatacgccaaaccgtttggtcgaaccgtaattttgcctagtgaagtgcagaactttttagcaatgcaaaagattgagaagtttcctggtattggaccgaagacgcaagaagagctgcatcagatgggtgtttatactggggcagatttacaaaaaattgaggttttaaccttaattaaaaaatttaagaaaatggggtatattttagcccaacatgcacgtggaatagatttaagacctgttgttacagactcagaggctaatcgaaaatcaattggcatggagcggacttacgagcctgcaatttatactgaggatgaagccctaaccaatattcgtaactattgcaatcatttggaagcagcattaaaaaaacgcaattttaaggcaggtactgttgttattaaagtaagaaataataattttgatacggtaaccaagagaaaaaagttgaaaacaccttctgatagtcacttagatttttatgatgtggctcgtgacttgttcgaagcaacaagttcctttttagatgatggaattcgtttattgggagtcactgtaactgactttgaaaagaaaaaatatcaatcaatcagtttgttcgactaataaataaagctatttttctggtaaactagatacagatatttttacaagatgaggagattaaaaatgagtagttttgatgacatttatgaaaaaatcttacaatatcctacaattatcttgcaccgccacactagtcctgatccagacgcaattggttcacaagctggtttagctagagcattaatggaaaaattcccggacaagcgcatactttgtgctggggaaaacgatgaaggcgacttagcttggattaaccacatggatcaagtcaaggcaactgattacgaaggtgctttggtaattactactgataccgctaatacaccaagaatttctaataagttgtatgataagggtgactttttaattaagattgaccaccacccagatgttgatccatatgctgatatgagttacgtagatccagatgctccagcagcatgccaaatcattgtagacttcttgaatgaagagggctttaagattaccaaggaagttgcttacccactttatgctggaattgtaggcgataccggtcgtttcatgtatccagaaacttcagagcatacttttaaggtggctgctcaattagcttctactggaattaacattactgaaatcgctcgtaatattgctgatgtaacttttgatgaggcaaaattgcaagccttggcaatggacaagatggaaattgatcccgttggtgcagcttttacaattttgatgcagtcagacttgaagaagttaggtttgactgatgatcaagcaaatgttgctgtatctactccaggacgtattaaagatgtgcttgcttggaatgtttttgttgaaaaaccagatggtactttccgcgtacattaccgttcaaagggccctgtaatcaatgaattagctgctaagcatgatggtggtggtcatgcattagctagtggtgctaacgctaaggatatggacgaagtaaagcaggtatttgcggaagtcgttgaagtaactaagaagtttaaagaagatcatgaataatatttttatagattcaagaattaaaccagctattcaagctggtttaaagaagatccattttgaaaagccaactaaggtgcaggagaaagttattcctgctatgttgtctgacttgagtgtagtagtgcaagcagcaaccggttcaggaaaaacgcatgcttatttagtaccaatttttaatgaaattgaagaagataaacgctatgttcaagcaatcgttactttgcctagtcgtgaattagccgatcagctttatcaagtagcacggcagctccgtgatgcggcagggatgcatttttcaattgcacatcttgcgggcagaactgatcgtgaacgtcaattagaaaagtatcaaaataatactccacaattggtgattgcaactccaggacgtttgttagactttgttcaaaagaaggtttttgcagttgatcaagtaaaaacttttgttatcgacgaagctgacatgaccttggacatgggctttttgaacgacattgatcaagttgctgctaaattgccgaaggatgtccaaattgctgccttttcagcaactattccagttaaattgtctaactttttacgcaaatatatggctcatcctgatgatatcgttattgataatcctagtgttattgcgccaacgattaaaaacgatttgcttgatattggctcaaaggatcgcaagaatgtcttgtacaaattgttaactatgggacaaccatatttggcgttggtttttgctaacactaagcaaaaggttgatgagttgactaattatttgcaagatcagggtttgaaggtagctaaaattcacggtggggtaactgaacgtgaaagaaagcgtactctgcgtcaggttgagcaaggacagtatcaatatgtggtagctagtgacctagctgctcgtggcttagatattgatggtgttagtctggttgtcaattatgaaataccacgtgatattgagtttgtaattcaccggattggtagaactggccgtaatggtttgtcaggtcacgccattactttgattcgtgaagaagaaatgaaccggattgaagacctagaaaaaatgggtgttcattttgactttgttgagattaagaatggtgaattagtgccacgtaaacactatcgcagtcgtgaaaatcgtcaaagcaagaatcgtaagcttgataccaagctggtgggttacgttaaaaaagagaagagaaagcgtaagccaggttacaagaagaagattaagcgtgcgattcaagaggataatcgtcaaaaacgtaagttggaacagcgtcatgaggttcgtaaggcaaaacgtttgagaaagcgcaagcgtgaacaagggctttgacagaagcggattttgtagtacaattatttcagcttaagatatgttttttgatcaattatttcaaagagagagccagttagatgagaatggcttaataatagtcaaaaaatgctcctttaagtttcataattaagaatatcaagaggtaacaaacactgttgcaatcaaggtggtaccgcgcgtggagcgtccttgaagaaagcaatagtgttttttatttatttttagggagatttattttaatgaagaaactaaatagttcagagtttcgccaaatgtttttagacttcttcaaggatcatggtcacatgattatgccaagtgcatcattaatcccacaagatgacccaactcttctttggattaactcaggtgttgctaccatgaagaagtactttgatggctcagttgtaccaaaaaatcacagaattacttcatctcaaaagtcaatcagaaccaacgatattgaaaatgttggtaagactgcacgtcaccaaactttctttgaaatgcttggtaacttctcagttggtgactactttagagatgaagctattccttgggcatgggaattcttaactagtcctgattggcttggcttgccaaaggaaaagctttactgtactgtttatccaaaagatgaagactcatttaatgtttgggtaaaggcagggatgccagctgatcatattgttaagttggaagataacttctgggatattggtgaaggtccatgtggtcctgatactgaaatcttctacgaccgtggtcaagaaaacaacgacgttgctgaagacgatccagaaaacttccctggtggtgaaaatgcacgttaccttgaaatttggaacatcgtattttcacaatacaaccacttgccaaatggcaaatatgtagaccaaccacacaagaatatcgatactgggatgggactagaacgtgtgctttctattttgcaagatgcaccaaccaactttgaaaccgacttgttcttgccaattattcacgccactgaagaaatgactgatgacaagaagtacggcgttaacaaggaagacactactgctttcaagattatcgctgaccacgttcgtgccgtaagttttgcgattgctgatggtgcgcttccttcaaactcgggccgtggttatgttcttcgtcgtttgatccgtcgcgcagacttgaatggtcaacgcttaggaattaagggtgccttcctttacaagttggttccagttgttggaaaaatcatggaaagtcactacccagaagttatggatcaacgcggctttatcgaaaacgttatccaaaacgaagaagaaagatttcaatcaactcttgatactggtttgactttgcttgacgacttaatcgacaaggcaaagaattctaaggataagaccatttcaggtaaagatgccttcaagatgttcgatacttacggcttcccatatgaattgacttttgaatcagcacaagatgctggccttaaggttgacaagaagggctttgatgcagaaatggctgctcaaaaagagcgtgcacgtaaagctcgtggtgaccttcaatcaatgggacgtcaagatgtaactttaatgaacattaaggataagtcagtctttgaacgtgatacttacgaagaaccacatgcaaagctagttgacattgttgttgatgataagttggttgataaggccgatggcgaacatgctactttggtctttgacaagactccattttacgcagaacgtggtggtcaagttgccgaccacggtgacatttacaaccaagacggtgaattggttgccaaggttactgacgtacaacacgctcctaatgaccaaaacttgcactttgttgatttgattttgccagttgaaaagggtcaagaatacgtattgaagttagataaggaacgtcgtgaagggttacgtcactctcactcagcaactcaccttcttcacgctgctcttcgtcaagtcttaggtgaacacactcaccaagctggttcattagttgatcctgactacttaagatttgactttactgcaatggaaccaatgaccaagcgtgagcttaagaccgttgaagaattggttaaccaaaagatttgggaagctattcaagttaagactactatcactacccctgaagagggtgaaaagatgggtgctttagccctctttgatagcaagtacggtgataaggttcgtgttgttcaaatgggtgacttctcaagtgaattctgtggtggtactcacgtggacaatactaaccaaattggaatcttcaagattacttcagaatcagctgtcggtgctggtatgcgtagaattgaagctgtaacttctaagaaggcttatgaatacttggcaaaccgttcagacttacttgatgatattcaagaagaagttaaggcaaccaagccagataacattgtcgataagattgattcacttgaaagtgatttgcacgatgctcaaaagcaagttgaaactttgaacaagaagatcaatgctgctaaggctggtcaaatctttaatgacgttaaacaagctggtgacttgactgtcattgctgctactgcagatgttaacgggatgaatgacttgcgtgaacttgctgataactggaagagcggcaacaagtctgatgttttagttttagctgctgaaaatgctggcaaggctaatatgattattgctttagaccaaaaggcattagacaagggccttaaagcaggtaacttaatcaagatcgctgccccaatctttggaggtggcggtggcggccgtccaaacatggctcaagccggtggtaagaatccagcaggcttgaatgatgctattaaggcagttattgacgaaatttctaagaactaagaattaattaattgtgtttaagctttttttcaagtaaaattgttgacaggaggaataaatatgagttcgctagataagactatgcattttgactttaatcagaacaaaggaaaaaatgtttatgatactctgcaagatgtttacaatgcgcttgaagaaaagggctataatcctattaaccagattgtaggttacttactttctggcgatcctgcttatattccacggcataacgatgcccgtaatttgattcttaagcacgaacgtgacgagattattgaagaacttgttaagagttatcttggtaagaataaataatgcgtttattaggtttagatgtaggttctaaaactgtgggagtagcaattagcgatgagctaggaattactgcccagaagttggagactatccagattgatgaaagcagatataactttggtatgcgtccattgaagaagctagtcagacaatatgaagttgacggtttcgtattaggtttacctaagaatatggatggtacttctggtagttccgtagctagaagtaaggcatacggcaaacgactagaggaaaagtttggtttacctgtacattattctgatgagagattgacaacaattgaatcacgacgagtacttgttgaggatgcagggatccatgatcgcaagaagcgtaaacaagtaattgatcagatggcagcggtgctcatcttgcaaaattatttagatttacaccgaaaggattaaaatggcagcacaagttaatggtgacgatcaagatcgtcaaattactttgattgatgatcaaggtaatgaagaattgtatgagatattatttacttttcattcagatgattatgacaaatcttacgtgcttctttatccagccgctgttggcgatgatgaagatattgaggtgcaagctttcagttatgatgccgatgatgccggcgatgtaacaagtagcgatttgcatgagattgaatctgatgatgagtgggacatggtccagggagttttaaatactttcttagatgatgaccgcttgagtggtaaataataaaaagaggactggctgtggctggtcctttttgttagttttagaaaaaagataaaaatgaacaagaaaatattagagattttagaatttggcgaaattactaagcgcttgagtaaattagcgattactggtcccgctaaaaaagaagcggaggaattattacctagtggtgattttgaacaagtacaaaatgagttaaagcagactttagctttgactaatttgctacgaattgagggacaacttcctttaacggactttcaggacgtacgtccaagtactaaacgtttaagcatgaaagctaatctaaatgctaaggagttaggcaacttattattggtattaagtttagctcatgaaattaatgatttcttggcagaaatagatccaaataaattggatttgaccgcaatcgatgcaattttagatcaattagatgtgccagatctcttatttagagaattaaagaaatcagttgattatgatggcgaagtattagatacagcttcacatgagcttgctcgtttgcgtcatgatatacgttctaatgaagagaaaattaagaataagatggatgcttatactaagggcaatagtagtaagtatttatctgagcaaattgtgactattcgtgatgaccgctatgttattccagttaagcaagaatatcgggcaaaatttggtggggtagttcatgatcaaagtgccagtggtcaaacactgtttatagagccggaagccgttttaaaccttaataaccgccaacagaatttaattgctcaagaaaaacaagaaattcgtaatattttgaagcacttatctaatttggctcgtgaagaaattactagtttgaataatattgcggctgcattaactggactagatttcttgcaggctaaagccaagttagcaaaagaaatgaaggcaagtgagcctcgtctgacacaagaccattctttgaacttattaaaagcgcgtcacccattgattgacccagaaaaggtagtacctaatgacattcgtttaggtggtgaatttgatactatgctgatcacggggcctaacaccggtggtaagacaattaccttaaaaacagcaggattgcttcaattgatggcacagtctggattatttatcccggctgaagaaggtagcaaggttggcgtctttaagcaagtttatgctgatattggcgatgaacagtcaattgaacaatcgttaagtactttttcatcacatatcaatgacattattgcgatcatgaagaatgttgattctgagaccttagttttaattgatgaaattggtgcagggactgatccagaagagggtgctagtttggcaattagtatcttagactttttgcgtaaaaaagatgctaagatcatggtgacaacgcactatcctgaattgaagctttatggttataatcggccacggacgactaatgcctcaatggaatttgacttaaagaccttgtcgccaacttatcatttgcagattggtattcctggtcatagtaatgcctttgccattgcccgcaagctagggatgcgtgaagatgttgtcaaaaatgcccagaacttaatgtcagatgaagattctgatattaataagatgatcaccaagttgaatacgcaaaccaaggcagctactgtggctcgcaatcgtctgcaaaccagtttggatcggagccaaaaattggagcaaaagttgcaacaagcacttgattggtataaccaacgtgtacaaaaacagcttgattttgcacaagagcgagctaatgaagttgttgccaaacgccgtaaaaaagctgatgagattattgcccaacttgaaaaacaaaagaacatgggcgtcaaggaaaataagattattgaagctaaaggcgaactcaacagtttagagcgtcaggctaataatttggctcataataaggtattacagcgtgaaaaacgtcgtcaccatgtaagtgtaggcgatcgagtaaaggtcctctcatatggtcagacaggtacgattactaagaagttatctgaacatgaatatgaggttcagatgggaattatcaaagttaaggttagtgatcgcgatattgagaggattgaaaagggcgaaagtactaagcctagacaaactgttagagcaaccagtgcggttagaagaagtaatgctcatagcgagctggatttgcgaggccaacgctatgatgaagcaatgactaatttggaccgatatattgattctgttttactggcaggacttgatacggttacgattattcacggtattggtactggtgcgattagaaaaggtgtttggcaatatctccgcagcagcaatcatgtaaagaactttaattatgcaccagctaatgaaggtggcaatggtgcaacaattgtacaattaaagtaagcgtcttacttgcaaaaagtaagtataatagaatatacttataatataaataaatgaattgaaaaaatgtgaggtaataattatggttgaagcaattaatgatcaaaattttgaagaagaaactaagaatggtgtagcattagtagacttttgggcaacttggtgtggtccatgtaagatgcaatcaccagtaattgatcaattatctgaagaacgtcaagacgttaacttctacaagatggatgttgaccaaaatcaagatacagctaagaatttgggtattatggctattcctactttaatcgtaaagaaggatggcaatattgtagaccgaattactggttacactccaaaggaaaagttaaaccaaattttggatcaatatgctgattaatttaaaaatcaaaaaaagcttgagacgatgttgcctcaagcttttttgatatatcacttattttgatttacttgcttttttagcaagtcacgaatttcttctaaatagtcggcctcagttggaccagcttctttttctttcttgggcattactctatttaaagccttgatcattaaaaataccacaaatgaaatgatcaagaagttaatgacagaattgatgaagctgccatatttaaatgtagcatccccaaccttaaaaacgaggttagaaaaatcaattttgccggcaaagatctcaagtagggggttgatcaagttttttactaaagattgtacgatagcagtgaaggcagcaccgatgattacaccaactgccatgtccattacattgccacgtgaaataaactctttaaattctttaatcatgctctactcctatatctaatatatctaaaaaaatgcgattttaactaaagtatatagtagtggttatttatagtctatcaatttgcttttaaccgaagcgagcgataaattgaactttcttttctttatctaaaatattaatttcacattcggtggttcgactagttgatttttgaaatgcttccgcgatcattccgccttcaagagagaattccttgctggcgctattcaaacgatcagtgacagtttgaccacttaattcgtaagtagtaaatgatcgtctttctttaactttttctagcttaccaaattcagccatgttgaagaattcaactaaatcatcataatcacttaaatcatattttcgcgcgattctcttgccagcccaataaagaattgaggcgtcatcatcgcctaaaatagttggcaaaaggaaatcgcggtaaagttggttaataaaatatacgtgctcgtttgtgttttctgtgttttctgtcataaacttgttcatcccttttattcttttttattttaccgtaaactagtagaagtagaaaataaatttttgattttaagagggttttattatggataatcgtccgattggattattggattcagggctaggtggcctatctgttgcaaaaaaagtaattgaaaaattgcctaatgaatcaactgtttttattggtgataacgctcatatgccgtatggcgatcgaactaaagaagagattattgaactagttagaaaatcagtccaatttttgttagagaaaaatgttaagctgataatttttgcctgcaatactgcgacagcaatggctatgagtacgattcaagcagaaatcgatccacaaattatcggagttattcagtcgggaagtttggccgcttcacggacaactaagaataaaaaagttgcggtagtttcaactaaagcaacagcagaatcacatgcttatgctaaagagatccgtttccgtgatccagaaattcaggtaacggaattagctgcccctaaacttgcaccacttgtggaggctcaaaaagatcatgaaaccaacttaaaagtagttaaagagagtttgacccccttacaaggaaaagactttgacactttaattatgggctgtacgcattatccattgattcagaaagaatttaaagaagcaattaatgataaaaatgttactatcttggatcctgcagatcaagttgcacagtatacgtttaatgtgatgcggcgcgatggtttgtttagtgatggtaatgaaaaagtcagtcatgaatattacactacaggcgatccaactagttttgatcatttagcaaggacattcatggatgatgcaactttaacatctaagcatgtggatacggagaatgaataatggttaaagaaattttatttgcgactggtaatcaaggtaaagcaaaagaactaaaagaagcctttaaacaagctggggtaaatgtcgagattaagacgaatgctgacttagacaatccgcctcatccgattgaaagtggccatacgtttgaagctaatgccaagattaaggcccatgagttagctaactttagcaagttgccaacgattgcagatgattcgggcttaatagttgatgccttaaatggggagcctggtgttagaagtgcacggtatgcaggcgaagctcacaatgacgcaaagaacaacgccaagttattagctgaattaggcggtgtaccggatgaaaaaagaacggctaaattttggactacgattgtagtttcgatgccaggtgaatttgataaagacttggttgtgtcaggtacttgcagtggtcgtattttggccgccccatgtggtgaagatggttttggctatgatccattgttttatattccggaaaaagaaaaaacttttgcacagatgactactgatgaaaagaatgagctttctcatcgtggtaatgcagtgcgaaaattgctccaagaattgccagcttggttagaacaatttgattagataaataagcttcaaggtcataatgacttttgaagcttatttgatagttaaccaaaatatttgttagtgtaagttattaagaaattgtattagaaatggatgcatgggaattactaaaccaccaccaatgagcgtagttaatacaatttttttaacaaatttaaaaatcataatacaggagtcctttctatgaataaaaaagataacgtatatggacaaaaatataggaaattgcgagtactacatcatattagtttagtgaatgcagctaagaatgtaacaaataaatctacattagcagaatgggaaaaaggtaaagataatttatcttggtgtaaagtaatacaacttctttttaatattcatattcaaccaatagaatttttagaggatagtgtatcttcacaattgtacagtgcgataacaaatattgctgttgcatatcgaaggaatgatatgcaacaattgataataatttttaaagaaaatctgaaaaaatatgaaggagataccaaaagcaaagattatatgtttcaagctgctattgctgcaaatttttatgaagatttatcagagcataatgtatgtccttcaattttaaaagataaaattattttatatttttcaaatataattgataataaaaatttttggtgttatgaagatatattttattttgggttaattacgcagttattagatgcaagacatttacacggcttttctttgaaattattagaatatattgaaaagaaccctattgattctaaagtgtggaatgaattagcaataaacgctttattaaatgctgacttttctttaatgaaaaaagatttaaaaaaagccgaagaattatacaatagattggatatattggaagctatagataattatgctgaattaatcattcgtaagaaatttttagaaagcttgattcagtatttaaaaaataatagcaatgtagagatcttttttttatttcgttgcctagattttttagatttaactaatatgaaattagatttcgaatctgcattcctacaaattaaaaagatttataacaaatgatcatcttctttcagttgaattcattaggcatgatagcattttctaagatagcaaataaatcaatttccgataattcggaaatttatcatatagcagttaaagaaagagcaataataaatttgtaaaaactataaagaaaaatttaaaaagtgtgattattatgtttttacctaaaaagattatagtatcaagcttaatgatggctactttagttggatttagtagtttagcagtggataacgaatcagtatcggcaactagctatgataatggtacacaagaaaatattgaggaacttatcccaacagctcatcatttatttacagaagcggagataaatagtttttcagagctaataacagtaaaaaatggtgaataccaagtagatcaaaatagagcaaatcaggtaagtttaaggaaagtacagttggcaaatcaatttgtaagtcaggttaacgagactaaaagagatttaagattgtatggtgtagatttagcccatccacatcataattactttacgtataaggactttagttggggaactagatattatttttcaactaatgctgctgtaacacggatgcaaaaggttttaagaaatggtaatgcagttatgggtggcgcaagtatagtaggtggagccattggtggggtaattcctgcattagcaggttcagttgtagcaaatcacttttcaaatatggctgctgatttaggagactataataatgcacatagaaataaacaaatttatatggatgtaaattggacgggaggctattcatttcatatttggcattagtttggaggtgaagatatggcactaatatcaatagctgttttagcattaatagtgatgatcataacgtgtttgccagttactcagaggtatttttacaaatatcttgggaaaatcggatattggagtcttttgattatttttattatttatcttttaattgatatttggctctggttgagaagaccatataagaccgcagatttttggttaacatttagcagtatcaatattgcgggaattgttgctcttgttaaaacttattttgatattaaaaaattgaagtaaaaaataatcctattaaatcattaaaagtttgatttaataggattttattttgagttaaaagctaaaattttaagtgctgcttttggcaatagtttttgctggcaaactagtatctgcgaattcaatcttatttttttgcaaaatttcaatatatttacttagatacaaatttctcacagcagattgtttaccaggcttaacttgaaaatgaatggaataaacaaattttttccctgtttgttcggtcacaccgacaatagtaggacctgatacaattgtctttttctcaggctggatcttacgattgcattctttgattaacttgttaacttcatcaatatcgtttttggtatcaagatccaaattaatgtctagtgctacaccgccatgggctaggttttgcacaatggtaatgttgcggttagggatgaaaataattgagccatctgaacccttgagacgagtagttctgaggcctagttgcacgacggtaccaacattagtgccaatctgaactaaatctccaacatcaaattggtcttcacttagaataaagaaaccgttgaccaaatcactaacaaagccttgtgcgcccattcctaaagctagggaaaaaattccagcactggctaacaaggtgccaactggtacacctagaatagagagaataccgaataaatagaagaagataagggtatattgaaaaacgctgttgatcaaagcggtaatcgttcgcgttcgtttatttttaaccgtgttatgcttggctaagtaattattaattattttatgaccaaaatgggataaaaggtaaaaaatgagtgaagtaatagctaattgccaaataattgacaataaattttggctaattttactccaatcaatttcaattttctgtatatttatgtgagtaggaatcttcatttggtgtcctttctattgcttacgggtataattaagaataacaagacattaattgagaataaaggatattcatgctaaactttttttagatgttgatggaggtagaaaatgacaatttcttatggtgctttagcaggcttaattgcggcgattgcattcttaattttagtattatttacgattccaatgctaattcggaccgcgaagttgttgaaagaaactagtgcaactattcaaacaactaacgagtcaatgaagaaaatttctgaagatatggatggcttgatggatcaaacttcggatttgttagataaaactaatgacctaatgaccgatgttaatggtaaaatgaagacgttagatccagttgttaaagctgctgcagatttaggcgaaagcgtatcagaattaaacgattcatctaaaaagatcgctaaacgctttagcagcaatcatttaagccgtacgggtcttatttcttcaatagctgcgacggcatttgcaagacgcaagcgtcgcagaggtgaaaattaataaaggaggaattcaccatgaaaaaattcgcaagtttcttattaggtgccgttgcaggatgtgcagcaggttttctcgcaggttcacttcttgttagtgatgaacaagttgatgacgttaagaacaagattaaagataatgacaagcttcaagatttgaagaagaaatacgataatggtactgaaatcgtcaagaatcaattagcatcattccctaagaatgttgaagatgattcagaattgaaggattttgacgacatcgtaatcgatgactcaaataaagatgacgatgacagtgaaaatgctgaagagtcagttaacgatttgaacaatgctgaaaaagatgatactgatgcagcatctacttcagaaaaaccacaagcttaattaaagtcaaaaagaaaaggagctggtcgtgatacaatcccactaaagtggacgatttaaatacataaagtattcaattatccatggaggtgggattttttatgtccagaaaaagtaaatattcattcgatcaaaagatatgggcagttgaacaatacttgaatggtaataggagcagcgttgaaatagctaaacggcttaagatgccaagtaaaagtggagcgatgcaagtaagaagatgggttcatcaatatcaaagcaatcgtgatacccttctaagtaatgctcaatacaataatcattactctaaggcatttaaagaaaaggttgttcaagaatatttagctggcaaaatgtcgttaccttctttagctaataaatatggcattagaagcaatggaacagtatcagaatgggtttccaagtataatagtcatatagaaaatcgggactatgatccccatccggaggtctatatgactaaagcaagaagaaaaactacccagcaagaaagaattcagattgttcaatactgtcttaatcacgacaagaattacactcaaacagctgtcaaatttgattgttcttaccagcaggtttacagctggacacacaaatatctagctaatggtgaaacaggattaacagataaacgaggcagacataagaagccagaagagctaactgagttagaactggctaatcgaaaaattaaggaattagagcgtcagctcaaagaagaacaaactaagaacgaattcctaaaaaaattagatcagttagaaaggatgtgcttgccggacaaccaagatacagacaagccgcaataaaaagacgctggaaacaagaaacatatcagttaatccatgactgccatcaaaagtacaattggaagattgatttaatgtgcaaatgggctaaaatagcacgctcagcttattacaaatactttgatcctaagcgcaagccgagtaagcgtgaagaacgagacaaaaagattgaagcaaagatcattgaaataacccagtctaacaacagtctgtttgggacggaaaagatgaccatggcagttaatcgacagatgtctgatgaaaagccggtttatcataaaactgtttaccgcttgatgtgtatcaatggcattagatcacaaaagcctagataccagaagctaaagttcaagcatacaacgcctgagaaaacggccgaaaacaagttaaaaagagactttaatgcatctagacctaatgaaaaatggtgtacagatatcactgaagtcgttgctgctaacctgcctaaggcatatctatgtactgtgtttgatctatatgatcgctatcctgttggctacgcaattagtaaacgaaacgatactgctttagttcaagcagcctataagcaggctgttaaagcataccctaatgctcatccgcttttccatagtgatcgtggttttcaatttactcgcgcacctttccaaaaccaattagaagaccaaggcatgacgcaatcaatgtctcgtgttggctgctgtattgataatggtccaatggaaggctggcaaggcattatcaaagaaatgcgagttattcttcatcctcaagtggccagttatgatgaacttaatgattctatttgtaagacaatagattactacattaatgaagatccacagaaacgttttaacggtttaactgctggtgaaatgcgcaaagaagcgatgaaaggcaatattaagaattgccctattgcaccaaatcatcgaattgagaaatactggcaaaaaatacacgaaaagaaaataagagaagccaaaaaatcctcagctgattattaatcaactgaggaataaaagctttatgtaattctactgtctacttgacagggaatgtatcatcgtgatgatcagctccttttttatgacaaaattagtctttaagtggcaaaacttttaagtccttgtcagtgtgagtaaaggtttcaaagccgtccttagtaacgacaccacaatcttcaattctgacaccagcaaagccagggatgtagatacctggttcaatggagaagcacattccttcttcaagaactaagtcgttaccttgtacgattgatggatattcatgaacgtttttaccaatgccgtgacctaggcggtgaatgaagtattcaccatagccagccttagtaatgatgtcacgagccacgctatctaattcttcagcggtgattcctggcttagcagcttcgattgcggcttgttgagcttcacgatcaacttcataaatttcgcgttgcttagcagtaggttcaccgtaagcaacagttcgactagaatctgatgcgtaaccatcgtgcatggtacctaagtcgaataaaactaattcatttggttgaacagtgttcatagttggaccaaggtgaggattagcggcgtttttaccagcttgtacgatggtttcaaaactttcatgcataacacctttttgaatttttagttggtaatcaatttgtccagcgatgcttctttcggtgacgccagttctaattgcgtcaaagccaatcttaaaagcgaagtctgcttctgcaccagcgccttgcaacttcttgatttcttcaggtgtcttgtaaagacgaagtttttcaataaaaggtgaaacatcgttagtgaaactagcgttaggaaattcaccacgtaagagctggtagtgggcaacagacaaatcatctttttcaattgcccaattatgggtatcgtgagttctctttttgacattagttgcgatgatgttccaaggattttcggaatcaaggtagccaataacgtcgccatcccatgcggaagcttttgcttcttctacgtttaaagctggacagaaaataaatggttccgcatcttttaaaacaattaaagcaaagattctctcatgtggttccattgagtaaccagtaaagtaggaaatggtgattggattagaaatgtaagcaagatcattattggagtcttgcaaccattgttgtaatttatctaagttcatattgtcctcttttcttgcaaattatgttgactgtagtatatcatgatttcttaatgaaaaaatgaaagaaaatctgtaaacgtttgcattttatgcagcgtcgtgatatctttaagtgaagaattttttggaaggactgagagataagagatgcataaacaagaagttacaatctatgacgtcgctcgagaagctaaggtttcaatggctacggtttctcgtgttgtgaatggtaatagtaatgttagaaaagagacacgtgaccgtgttctcgaagttattaaaagactgcactatcaaccaaacgctgtagctcaaggtttagcttctaagcggactactacagtagggttaattgtcccagatttaactaatttatactttgcagaattatctaagggtattgatgatattgcacttttatataaatacaacatcattattactagtattgaaaaccgcttgatgaaggaagaccaagttattcaaagtttgctgaataagcaagttgacggtgtaatttatatgtctaaccgtttatcagatgcagcagctgatgcctttaagcggactgatactcctgtggttttagcaggtactaaagacaatcgtgatgattttgcttctgtcacaattgactataagaaggctgatactgaagcattaaatttgatgtaccatgatggtaagaagcatttgggaatcgtagttggtgatcaagatgctgtagttaacagcgaaaacagaatccctgcttatgaagaattcatggaagaaaatgatttgggcactcctcgaatctatactgatattaaagactattcagatggttataatttatacccacaattagttaaagatggcgttgatggtgtaattgttactcgcgatatttcatcagttggtattttgaattctgcgatggatgcaggtaagaaagtgccagaagatttggaaatcgtgaccgccagtgctacgcagttagcttctgttgttcgtccagctttgactacgattaagcagccactttatgatatgggtgccgtagcaatgagaatgttgactaagttgatgaacaatgaagaagtagatgatactcatattgttttgccatatgaattagttaaaaagcaaagtactttaaatcaataattaagtgaagcaaaaaagaccagtttactggtctttttgttttagtagataattttgttaatctgttgaagcttttgtgtaaaagtggttggtgcaattgcttgattaggattatagggcaaaagcacgagattagtgtactgactgacccgtggtaaggactgataatctatgaaatcgtcttgactaaagaagccatagaacaagatatcttttgccttaacccaacctagtttggtataaatccacatgtttttaggactaccattaaaattttgaatttttaataattgatttgcgggtaatttttgctgcgttttggcttggttatcaggataacgataaattgtaactttttggttaggtttagcgataattttcttattttgataaggagcaatatctcgctttgttaagtcaaaattaacgaattctgccgaaataaaagttttttcagcaatttgataaaataagcgatcatctacacggacgccataagtgacattgactttttgacctggttgcacgtacttcttttctttgatgcgaacatacggattcatcattgtagcggctttagttttaccaaaataaattccagttctattaatagcgtactttttagtgccacttttggctaatttatatttaaaaccagtagcgggatagttggtaaccacgccatcaacattccgattaattagccaatgccatagggcaggcgattcgtccatttcggcccagacaaacagttgcttatgtaatttgtgaagccagtgaattaaaaagggatgctcttgcacaatgtcagaagaagcattgatagcattaacttgaggtaaattactgaaattaatgcgtttcaggctaccaacgatcaaaattagataagcttcaggcataatttttctaaagtgaaagagactagcagcggaaaatgaatgaatcatgattcttttctgcatatggtattttttaactatttgtgcgattttatcctctaactcataggacggatttaatccatgatcaattttagtctctaagacaaatttagtgtttggtttattttgataatgcttaaaaagctcactgagtgacataacgtgttcgccattgtcatattgcagttgtttaagtgctgtaaaattattttgtgatacaattgcatgtgtatgagtaactcggaagaggtcatcatcatgtgcaatgaccggaactccatcctttgagagctggagatcgagttcaacgtaatcagcaccagaattaaaggcggaatcgtcagcctgaattgtttcttcaggatatttgatgggatcaccacggtgccctacaactgtaaaaccactatttatgaaaaagactaagctaaaaaaaagaacccaaacgagtcggcttttaaatttcatgtgtacacctctatcgcatacttaacaatagcatggttacacatttttttctatttatagtactattcttttatcagtaatcggtatgattgaaatctaaaggatgagatttaatggaacaattggacttaattgaagaagttaccagaaatgatggcagtcgatattatgaaatctctaatattgaccaaaatggaattgcagaattagctgcagatcatggcttaattaaaaaagtcaaaatactgcagctgaatattcctcgaactaaggcactgattgcttatgaaaaatatatcaatgatacttatgacttgcagactttgactaatgaaagtgattggaaaaatccaaaatgggtagaatgggataaacctaagggaaaaattttagacgcatataatatgatcttaaaagccaatcgaattggttagaaagtggcataaaaaatggaacaactgcgaattttacataccaatgatcttcattcacattttgaacatttccctaaaatcggacgttacttgaaaaaagcgcaggctgatcaatcggttgatggtatctacacttttgatgcaggagactttatggatcggtctcatcctttaactgatgctacggaaggtcaagccaacatcaaattgatgaatgggtttaactatgatgcaattacgattggcaataatgagggaatttctaatccacattgggtattggaacatttatttgatcatgcggactttccgacagttttagcaaatttgcgtgaagaagatgaatcaatgcctaaatgggcagtcggccatatgtttttaactactaagaaaaagacgcgaattgctttaattggcctgactgcagcttatccaatgacttatggtcctaatcattggcatgtcaagatgctaggtgacagtatggatcacgaattagctcaaattgaaggaaagtatgatgtcttaattttattgactcatgttggattaaaaatggatcgctggttagcgaaacattatcctcaaattaatttaattgtaggaggccacagccatgatctgattgaacatggtgaaaaagtggggcatacttggattacgcaaacaggtaaatggggaaactatgtgggtgatattcatctagaacttgaagatcatcacgtgattaaggtagtacctcgcactatttctactgcttcgatgccagaagaaccggaagataaggcagtgattcagggctactatgatgaaggtaagcgacttttatcagaacgaaaagtggctaatttacctgaaaaatttgcggatgataaagtagcagccgttcaagtttctcttgatgcgattgctgattttgctaaaacagatttagccattttaagctcaggcctattcttgaccccgtttaagagtggaataattactcaatatgatttacaaaatgccttaccgcatccaatgcacgttgttcgttcaaccttgaaaggttatgatttgtggcgactagtgatggaaattgaaaagaatcggcattacctagaccattttccactgcaagggatgagttttcgaggaaaaatttttggtcagatgtattacaaagggatcaaggttgatatgcgtagacgtgtagtttacgtcaatgggcatgaaattgatccacaaaaagaatataaaattgcctgtttggatcattatgtcttagttccatttttcccaactttggctattgtcggtgaaaatgagtttttattcccacaatttttacgtgaagttgttggtaaatatttggctgaaaaatatcctttaacagcgagaagtgaaaaagatgactgaagaaaataaatttgaacaagaacagccaattagacacccacttgctgacgtggggcaagatggtaagagcattaagattggtgcgcagctttatagcatcattgtcaatgagcgagacgcacttgatttagaatctttgcgtaaaaaatatgatccttatcttgaccagtatgattatctggtgggggacgtttctagtgaacatttacgcttgaaaggcttttataaagacggtgctagaaccgcaattgataaaaaagaaatggcgatcgtggattatttaacggaatattgtaatcccggcggaccttattttatcttggaattaacgcatccagtacattattatcagcatcaacgtactaaaatacggcgatcacgtgaacgacgcgagcgcgattttggtaaaaatgagcgttatcatgcacgacgtcgaaattatcggaagaataaaaatgaaaataatccgtttaagaagcggcgtgttcatcaaactaaatttaagaaaaaacaatcaattgcagtgaaaaaagaatttggacggcatcattcatttattattaaaaagagaaagggaaactagtgaaagattaccgggtatttttaattgacttagacggaactgtttatcgtggtaaggaaacagttgaatcaggagtaagatttgttcatcgtttggttcaagcagggaaagactatttgtttttaaccaacaatacgaccagaacaccgcaaatggtagttgataaactaaagggacacggtatcgaaactgatacggaccatgtttatacgccaagtatggccacagctagctatattttacaaagagaacacaaggaaaagatcggcttgtatattattgggcagattggtctctggcgtgaattattgcaacatccagagtttgagcttaatgaagaaaatcccgattatgtaattgtcggtatggatacagatctgacttatcataaagtacgagtagcttcacgggcgattagacgtggagccacttttattgggactaatgccgatatgaatttaccagcagaggatgagctaattccaggcaatggttcacaatgtgcattcgttgctgcagcaagtggagtagagccactgtatattggtaagcctgaatcaattattgtaaaaatggctttggataaagttggctatagcaaagatgaggcacttttggtaggtgataattacgataccgatattaaagctggctttaatagtggagtagatcagttgttgactttgacaggtgtgacgaccaaagtggatattgcagataaacgtcaaccaacaattttagttaataacctagatgaatttgaattatgattactaaaaacaatattttttcgctgatttatcattttttgtttgctgtttctagcagtgtaattggggcaattgtggctagttggccattattgtttatttttatgatcgtacaaaagacatatgagacggttcacatgtctttgtttaaggtaatgcataattataaccagctgatgttttatttgctctggccctttaaaaagcagcttaaaatggataatttccctacatctgctaatgcggcagaacattttgcggaatgtaagcatttatttattctgactctattagtttttattatctgcatcatagtgcactttgtttttaaacgacaaaagaaaaagctactgcttaatttggataaatcagtagcccttattttgctattattgccaattattatttttccatttgcagtaaccaatttcgacagtttctttgtgatttttcaccatattttgtttaacaatagtgattggctgtttgatcctaatactgacccaattatcaatgtgctaacggaaggcttctttgcttcttgttttgccgttgctggggttatttatgaattatattttgctgaaaaattattacgtaagtaaaaaagagttccttagtggaactcttttttgagtgatatttttttcttgattgcgacaattgcgattggcacaactgatactaaaatgatagcaattacgatcattgaaaaatggtcctttacaaatggaatattgccaaagaagaaaccgatgattgtgaacaatcctgtccaaagcaagccacccaagatgttgtaggtgataaatttaccataatgcatcttactgccgccggaaatgaatgggacaaaagtacgaataaatggtataaatctacctataacgatcgtaattggtccgtggcgctcaaagaacttttcagcggccaaccgattattttgattaattaatttattgaaccagctatgtttttcaccagctctggttgaccaggcaccaatttcatagttgatactgtcaccgattatggcggcgaatgctactataagataaactagccaaatatttaagccatacttaggattagcagccattgcactcgcagcaaaaatcaacgaatcgcctggaagaaatggaaaaacgactaagcctgtttcaataaaaatgatagcgaataagattaaataggaccaaccaccgaattggttaacaatcgtgattaaatggtcatcaatgtgcaaaataaaatcgattaaactcatctggaactcctaaaaactagttgaatgaattgtcaaagttttttcagggaaaagatcacgcataatcgcggtgattgcaatctgggcttcgccaaaaccgagagcgattaaagggacgcgtccaggataggtaacaacatcgccagctgcataaacaccggcgatattagtttgcattgttgaattcaccttaatttgtgcgccagctaaatcgattccccattttttgacaaagcgattattagctttaaagccatatgcaacgactgcttggtctaacttgatattagttaaactatcttttcccatttcttttaaattaacgttcagttgattatcaaccaaattgatttgtttaggaagatagggagttaaaatttcaacattttttaaagacttaagttttttgacattagattcaagaccgcgaaattgattacggcgatgaatgattttgacattggcataattagctaattctagtgccaggtctaatgctgaatcgccgccaccaaagacgccaactgtttgtccgacaaatttttggggatctttaataaagtaatgaatccttttttgagtatcatcatccatagataatggtaaagctttaggtttaaaggcaccggcaccagtggtaatcaatatgctgcgggatgcaactatatcatcgataataaagccgtctttttgtttagtgacattttcaactttatggttagtaaaaatagttgtatccgttaaattatgtcgtaaattgtcgattagttcagttcctgtaatagagtcgtaagcaggaatatctttgattttcttaaaaggataaagcatttgtggctgtccgcctgtttcagataatgaatcaaacagtacggtcttgagtccatgaagatgggcaaatcgcgcggcaaataggccaacaggtccgccaccgataatagttaaatcaaattttttaattttaatgacctcctcaaagtagtgatgtatcaactttaacatgaattttgtaaatattcatttaaaaataagcttgtcaaaaaatgaattttaaggtatattattgaagtcgcctttttaagagcgagcataattctttattaaaaaatacttgcaattaatattcaagtattatatattaataaagtcgcttcgagagatgcgacgagagcttaaaaacagacatgcaaggaaagaaaacaaataaaaagaaaaaagtacttgcaaagaagtaaataagctggtaatatatttaaatgtcgtcaggtgaaagcagaaaaagcttgagcaagacgaaaaaaacaaatcaaaaaagttcttgacaaagaaatgatggtttgataaaatataaaagctgtctgttttgcaaaaaagcaagacagaggtagtactttgaaaactgaacaaagtttcgctaaaagtgtgcgggtgtaaaaacccaaacaagaagcgaagtcaattcgcaagcaataaatttgagacaaagatcttaaataaggaatgagcaatcattcaaactttttaaaatgagagtttgatcctggctcaggacgaacgctggcggcgtgcctaatacatgcaagtcgagcgagcggaactaacagatttacttcggtaatgacgttaggaaagcgagcggcggatgggtgagtaacacgtggggaacctgccccatagtctgggataccacttggaaacaggtgctaataccggataagaaagcagatcgcatgatcagcttttaaaaggcggcgtaagctgtcgctatgggatggccccgcggtgcattagctagttggtaaggtaaaggcttaccaaggcgatgatgcatagccgagttgagagactgatcggccacattgggactgagacacggcccaaactcctacgggaggcagcagtagggaatcttccacaatggacgcaagtctgatggagcaacgccgcgtgagtgaagaaggttttcggatcgtaaagctctgttgttggtgaagaaggatagaggtagtaactggcctttatttgacggtaatcaaccagaaagtcacggctaactacgtgccagcagccgcggtaatacgtaggtggcaagcgttgtccggatttattgggcgtaaagcgagcgcaggcggaagaataagtctgatgtgaaagccctcggcttaaccgaggaactgcatcggaaactgtttttcttgagtgcagaagaggagagtggaactccatgtgtagcggtggaatgcgtagatatatggaagaacaccagtggcgaaggcggctctctggtctgcaactgacgctgaggctcgaaagcatgggtagcgaacaggattagataccctggtagtccatgccgtaaacgatgagtgctaagtgttgggaggtttccgcctctcagtgctgcagctaacgcattaagcactccgcctggggagtacgaccgcaaggttgaaactcaaaggaattgacgggggcccgcacaagcggtggagcatgtggtttaattcgaagcaacgcgaagaaccttaccaggtcttgacatctagtgccatttgtagagatacaaagttcccttcggggacgctaagacaggtggtgcatggctgtcgtcagctcgtgtcgtgagatgttgggttaagtcccgcaacgagcgcaacccttgttattagttgccagcattaagttgggcactctaatgagactgccggtgacaaaccggaggaaggtggggatgacgtcaagtcatcatgccccttatgacctgggctacacacgtgctacaatgggcagtacaacgagaagcgagcctgcgaaggcaagcgaatctctgaaagctgttctcagttcggactgcagtctgcaactcgactgcacgaagctggaatcgctagtaatcgcggatcagcacgccgcggtgaatacgttcccgggccttgtacacaccgcccgtcacaccatgggagtctgcaatgcccaaagccggtggcctaaccttcgggaaggagccgtctaaggcagggcagatgactggggtgaagtcgtaacaaggtagccgtaggagaacctgcggctggatcacctcctttctaaggaagcgaaggatatggagagcaggaatgctaagagaagtatccagagcaagcggaagcacactgagaaactttgtttagttttgagggtagtacctcaaaaagagctagtacattgaaaactgaatataatccaagcaaaaaaccgagacaatcaaagagaacagattgtagagcgaccgagaagagaattcttgagtaaggtcaagtagaaaagggcgcacggtgaatgcctaggcactaacagccgaagaaggacgtgacgaactacgaaaagcttcggggagcggtaagtacgcagtgatccggagatatccgaatgggggaacccaatgcagagatgcattattgattagtgaatagatagctaatcaaaggaagacgcagtgaactgaaacatctaagtagctgcaggaagagaaagaaagatcgatttccttagtagcggcgagcgaagaggaaagagcccaaaccaagtgatttatcatttggggttgtaggactgcgacgtggcagtgtaagagatagttgaattatctgggaaggtaagccagagagggtgagagccccgtaagcgaaatctcaagcacgcctagcagaatcctgagtaggccgggacacgaggaatcccggttgaaaccgcgaggaccatctcgcaaggctaaatactagttagtgaccgatagtgaaccagtaccgtgagggaaaggtgaaaagaaccccggaaggggagtgaaaaagaacctgaaaccgtgtgtctacaagtagtcaaagcacattaaagtgcaatggcgtgccttttgtagaatgaaccggcgagttacgttatctagcgaggttaagtcagaaaagacggagccggagcgaaagcgagtcttaatagggcgaaaagttaggtgacgtagacccgaaaccaagtgacctacccatgaccaggctgaaggtgtggtaaaacgcactggagggccgaacccacgtaagttaaaaattgcggggatgagttgtgggtagcggtgaaattccaaacgaacttggagatagctggttctctccgaaatagctttagggctagcctcgtggagaggataatggaggtagagctctgtttggactaggggcccgtcaggggttactgaatccagataaactacgaattccagatatccatacacgggagtcagactgcgagtgataagatccgtagtcgaaagggaaacagcccagatcaccagttaaggtccccaaatctatgctaagtggaaaaggatgtggagttgcgtagacaactaggacgttggctcagaagcagccatcattcaaagagtgcgtaatagctcactagtcgagtggcgctgcgccgaaaatttaccggggctaagcatagtaccgaaactgtggatgtgttttaaagagcacgtggtaggagagcgttctaagagcggagaagttgaatcgagaggatcaatggagcgcttagaagtgagaatgccggtatgagtagcgaaagataggtgagaatcctatccgccgaaagactaaggtttcctggggcaggctcgtccgcccagggtaagtcgggacctaaggcaaggccgagaggcgtagtcgatggataacaggtagagattcctgtactgtgtcaaatcgttaagagcgaaggagggacgcaggaggtgaagcacgcatcgcgatggaacgatgttcaagcaacaagtgcggttaagagtcaaatgcttctaaccagcaacacgagttgtgaagaggagtgaattaaaagtagcgaaggtgtggtaatcacactgccaagaaaagcttctagccagagatgacatacccgtaccgcaaaccgacacaggtagtcgagtggagaacactaaggtgagcgagagaactctcgttaaggaactcggcaaaatgaccccgtaacttcggaagaaggggtgctagccaagagattggttagccgcagtgaataggcccaaacaactgtttatcaaaaacacaggtctctgcaaaatcgtaagatgacgtatagaggctgacacctgcccggtgctggaaggttaagaggagagcttagcgtaagcgaaggtttgaattgaagccccagtaaacggcggccgtaactataacggtcctaaggtagcgaaattccttgtcgggtaagttccgacctgcacgaaaggtgtaatgatttgggcactgtctcaacgagagactcggtgaaattataatacccgtgaagatgcgggttacccgcgacaggacggaaagaccccatggagcttcactgtagcttgatattgagtatcttttaaacatgtacaggataggtaggagccagagaagataggacgctagtcttattggaggcaatgttgggatactacccttgtttgaaggatgctctaacctcgacctgtaagccaggccagggacagtgtcaggtgggcagtttgactggggcggtcgcctcctaaagtgtaacggaggcgctcaaaggttccctcagaatggttggaaatcattcgcagagtgtaaaggtataagggagcttgactgcgagagagacaactcgagcaggtaggaaactaggacttagtgatctggtggtaccgtatggaagggccatcactcaacggataaaagctaccctggggataacaggcttatctcccccaagagttcacatcgacggggaggtttggcacctcgatgtcggctcgtcgcatcctggggctgaagtcggtcccaagggttgggctgttcgcccattaaagcggcacgcgagctgggttcagaacgtcgtgagacagttcggtccctatccgtcgtgggcgtaggaaatttgagaggagctgtccttagtacgagaggaccgggatggacgcaccgctggtgtaccagttgttccgccaggagcatcgctgggtagctatgtgcggaagggataagcgctgaaagcatctaagtgcgaagcccccctcaagatgagatttcctttgcgtaagcagtaagacacctcagagacgatgaggtagataggctgggagtggaagtcctgtgaaggatggagcggaccagtactaatcagtcgaggacttgaccaaagcgaagcaaactggaaggttttttgcgagaaggattatgtttagttttgagtgtaaaagctcaaaagagtacggtggcgaaagcaagaaggatacacctgttcccatgccgaacacagaagttaagcttcttaacgccgaaagtagttggtgggcaactgcctgcgaggaaaggaagctgccgtgctcaatatggaggattagctcagctgggagagcatctgccttacaagcaggaggtcacaggttcgagccctgtatcctccatatcgagtcgttagctcagttggtagagcaacggacttttaatccgtgggtcgagggttcaagtccctcacggctcatgaccctatatatgcgggtgtggcggaattggcagacgcgctagatttaggttctagtgttttcggacgtgtgggttcaagtcccaccacccgtattgccaaccacatattgacaatatgccgatttagctcagttggtagagcatctgtcttgtaaacagggggtcgtacgttcaagtcgtataatcggcatttatattacgcggaagtagttcagtggtagaacatcaccttgccatggtgggggtcgcgggttcgaatcccgtcttccgctttcatcaacacgccggagtggcggaattggtagacgcacgggacttaaaatcccgcggttggtttcaaccgtatcggttcgactccgatccccggcattgatgatgcgcccttagcgcaactggatagagtgtctgactacgaatcagaaggttgaaggttcaaatccttcagggcgcatataacgggaaatggctcagtttggtagagcacctggtttgggaccagggggtcgcaggttcgaatcctgttttcccgattgtaatctaatggtgattggttacattttggcggtgtagctcagctggctagagcgtccggttcatacccgggaggtcgagggttcgatcccccccgccgctataattgtaagcttggacctttagctcagttggttagagcagacggctcataaccgtcctgtcgtaggttcgagtcctacaaggtccataatatggcttttatattaatatggcttttatattaatatcgcgggatggagcagtctggtagctcgtcgggctcataacccgaaggtcgttggttcaaatccagctcccgcaatttggtccattggagcagtggtttatctcgcctccctgtcacggaggagatcatgggttcaaatcccatatggaccgtaagatggctcggtagctcagtcggtagagcaaaggattgaagctccttgtgtcggcggttcgattccgtcccgcgccatttcattttatattaggtgcgggtatagtttagtggtaaaacgaaagccttccaagctttagtcgcgagtccgattctcgttacccgctttatatgggcctatagctcagctggtttagagcgcacgcctgataagcgtgaggtcgatggttcaagtccatttaggcccattggagacatactcaagtggctgaagaggcgcccctgctaagggtgtagatcgggttattccggtgcgagggttcgaatctctctgtctccgctatatagaaaagtaactgttctagattaatttctagagcagtttttttgtgtaccgagcggcattcttagtccgatgaaagtgttagaactaagagccagtagcaatgatattatgagtatgggacgtttacaaaggagtaaatacctgctgaaacagtaaggaattacaaatgtatcgtcttatatgcaaccatatgtatagtggatggaaggagatgagttcgttaagttctctctgcattgaaaacacgtcataagatgttaaaaccttaattttgagttattgataaacctaaatgcatattattttgaatgacttaatggaaattattacacttcttttaggtaaaagtcttggacattgattcaagtcaataatcgtgtatataacatagggagagccgattgttttaaatttcttcttgtatgatctatattaaaaaaataattttgtgggggatttcatagtgatataaagaagcagtttaatatggaacaatttataaagatcatttagttaaagataagagaagctgttttgctctagctaatttgaagtattaagatagatataaatgttttacaacaaaaaaataaaaaagtacttgcattttgactgaatatctattaatattaaatacgttgtgattgagagatcacaatagtaatagctaattaaaaaaataaataaaaagttcttgacttttgaaatgtgattagttattataataaagtgctcttgagtgagttacatgacccgttggtcaagtggttaagacacggccctttcacggccataacatgggttcaaatcccgtacgggtcattgccacaatttatttttttggcattaagcaatggaggattacccaagtggcttaaggggacggttttgaaaaccgttaggcggttctgccgcgcgtgggttcaaatcccacatcctccttagttgaatatcgcgggatggagcagtctggtagctcgtcgggctcataacccgaaggtcgttggttcaaatccagctcccgcaatttggtccattggagcagtggtttatctcgcctccctgtcacggaggaaatcatgggttcaaatcccatatggaccgtaagatggctcggtagctcagttggtagagcaaaggattgaagctccttgtgtcggcggttcgattccgtcccgcgccatcatctggaggagtagcgaagtggctaaacgcggcggtctgtaaaaccgctctctctgagttcggcggttcgaatccaccctcctccataatagggatatcgtataaaggtagtacatcggtctccaaaaccgctagtgtgggttcaattcctactatccctgtttaccttcatggcggaattggtgaaggggttaacacactggtttgtggatccagcatgcgtgggttcgattcccacattccgccctagtattgggatatagccaagtggtaaggcattagactttgactctaacatgcgctggttcgaatccagctatcccaattctaaataatttcataacttatggcggtgtagccaagtggtaaggcagaggtctgcaaaaccttaatcgtcggttcaaatccgacctccgccttatcaaccgaataagttgattattttaaaatttaatattatggcggtgtggcggaattggcagacgcgtcagactcaaaatctggtgtccattacggacgtatcggttcgaccccgatcaccgctattattatgaagcgatccaattattggatcgctttttttttattttaaaatgttagcattttattatataaattgcacatgaatacaggaatctttataatgctacatatggaggtactcaaatgaatattggtctttataccgatacatattttccccagataagtggcgtagctacttcaattaaaacgttaaaagaagcgttggaaaagcaggggcataatgtatttatttttactactactgatccgaacgtgaaaaaaggaactgtagaaccgaatgtatttcgttttagcagtattccttttgtctcatttaccgatcggcgaatagcatttagaggactatttgaagcaaccaaagtagctaaagaagtcaatcttgatatagttcatactcaaactgaatttgcattaggtactattggcaaatatgtagctcatcaattagatattcctgctatccacacttaccatacgatgtatgaagattacttgcactatattttaaatgggcatttgcttcgtccatatcatgttagacaatttgttaaaagctatttgaaaaatatggatggatgtattgctcctagtggccgagttgaagaattattacggcgctatggcgttcaaataccaattagggtgattcctactggagtagatttgcagggcatgaacaacgatattcaacgtgatgtgcggcaagaacttggaattgatcaagatgcgcctgtaattttaaccttaagtagaattgcagccgaaaaaaagattaatcatattttgaacgtaatgcctgaaattattgatgaatttcctaatgtgaaatttgttatcgcaggtgatggccctgatgttgatgtgttaaaggatcaggtagagcgattaacactagagaattacgttatttttgtcggtaatgtagagcatggcgatgttggtaattattatcgaatggctgatctttttgtttcagctagtgatacagaaacacaggggttgacttatattgaggctctagctgcaggtacgccatgtgtggtttatgacacagactataccgaaaacatttttgatcaagatatttttgggcagacatttactacacaacaagaaatgttagaagagattattactttgcttaagcaagggacgaaaagaatcccgcaggaacttttgcaaaataaattacagaagatttcagctgatcaatttgctaaaaatgtgtctgatttttatcagtatgcaattgatcactatcaacctaagcatgatgaggagactaaaaagaggaactaaatgattagaattaatatgttctcgcaagctgattctgttaaaggacagggtgtaggttcagcttataatgaattgattaaacttcttaggacgcacttagtagacgaattttatgtaacgattaacaaatatggcaatagcgatttaacgcattatcacacgattaatccaacctattacgcaaatagtttttcaccagcacgtggcaggaagattggctatgttcactttttaccagatacattagaaggctcaattaagttgccaggcgtagctaaaaaagttttttatcaatatgtaattgatttttataaacgcatggatcaaattgttgtagttaatccaatctttattgataagttggttaactatggaattgatcggaacaaggttagatatattcctaattttgtttcaaaaacagaattttatgaagaatcattggccagcaaaaacgcatttcgtcatgaattaggaattccacttgataaatttgttgtttttggtgatggtcaagtacaggaacgcaaggggatcgatgactttgttaagatggcacaagctaatcctgatattcaatttatctgggcaggcggtttttcgtttggcaaaatcactgatggctatgatcattacaaagaaatggttgacaatccacctaagaatatgacgtttgcgggaattgtagagcgagagaagttagttaagtatttaaatattgcagacttatttgttcttccatcatatgatgaattgttcccaatgtcagttttggaagcattcagttgtggaacaccagtattattgcgtgaccttgatctttataaggcaattatcgatggctattatctaagcgggaaagattttggcgaaatgaatcaagtattgcaaaaagtagttgccaatccacaaactttgcagaaatacagcgaattatcgcgtaaggcaagtcaacagtattcagaagatcatttagctaaaatttgggacgaattttatcatgagcaatatgaattaggaaaagagctaggtcaaatacattaatgaataaaaaacatttgtggggcattctagttgttttagcaatcagtgcctttgtgctatatgcagatttaaaagctacaccgatatcggaaatattacgggcagctcatggcctgaatatttttgcattaatcatggtttttgctttaatgcttttgtcctatgtatgtgaagccggtatcttagctactttagctcatcgaaagaaagagcctaaaaggtcagcttggtcgtttttgcgaattccaattattcaagctctatttaatgcaattacaccaatgtccacgggtggacaaccatcacagctagccgcaatgattcaaatgggcatggaaggtggccgttccacctcaattttgctgatgaaatttattatttatcagatcgttgttttgtttgcctatgtatttacaattatttttggctttcacatggtaatgactaagttcgctggtttagcaatttttattgcaattggctttttgattcatgttagttcaattatctttttgctggcaattatgtttgcttatcgttttactaaaaaggcaactaattggttaatggacttgttggcaaaaatgatgaaaaaggaacgagttgagaagtggcgtaaggctactttagaaaagattgatactttttatgcagagagtcagaaactaaaaaaagaaaagaagaaattatttgttgcctcgcttttaacagtattgcagctacttttcttttactccgttccatttatggtattaacagcgctaaatgtaccttgttcttggtatcaagttacgcaaatgaatataatgattatcatgtttatggcgatcattcctattccaggtgcgtcaggaggggcagaatatagtttccaaacgttattctccaccttcatttcttcacatggtgcgttaattttggctatgtttatttggcgcttttcaacatattttttcggtatgcttctcggcatcttaggctggatttttgaaactgtcaaatcttttgtgtaaatagatctttctcgtaaattgattttttaattatttatttaatcaaagtaggattctaaggtgtcctgaacctgaccaaagcctttatgaattcgattgaaataacggtcattgtagctcattgcctgaatgccaataaaagcatcaagcgactgttcagttggaaactctgccttaggcttagctttgcgcttgatcacattgttaaatgattcaatcatgttagtcgaataaattgaagctctgatctgcttgggatagttataaaagaccagcagatctggttctatgtctttcaagcttctgataacatggctgtaaaccttgccccatttggtatagaagtcatgcaggacagctgtggcttcttctttgtttgtctgttgatgcacctgtttgaattcgttcatgatcttttcacgatcgtcgacgcgtactttagcgcagatattgcgcatgacatgaaccaaacagcgttgaaaatgagctttaggataagtcctggccaaggctgttttcatgccaacaacaccatcagaaagaaaaagctcaacttgctttaagcctcgggatttcatgttttgaagcatatctgtccagacttcaatgttctcgctaggtgcaatgcagtagtcaatgacctccttgtgcccattaggcttgatgccaatggcaatatagactgcttcacgctcaaatgtttctcggcgcaaaggaaggtatgtcgcatccaaatagacgcagaaaaacttgtcgcttagcttgcgtttgtggtaagcctcaacatttggaatcatctgcttggaaatatttgatacctgagctggactgtaatggctgccatacatcttttcaattagatcggctatttccctggtggtcacgcccttggagtaaagcttgataatcatgctttccaagatatccgagtgctgcttgtagtcaggcagcgtgtgctgatgaaattgaccgttgcgatcccggggcacttgcacttcaattgggccaaattgcgtatcaactttgcggaaataagcaccatttctagagttgccagtattccagccatttctggcatagggatcatagcccagaaaggcagtcaattcagcttctaacaagttattaacagcctgttgtagctctttgcgcaataaatcatttattttgtctggattgaatagagcttgagcaaaatctttggtaaaatcattcatgaaggagttcttctttctgtatgtgtttttttgttcaaaccaatcatacgagaaaggaactcctttttctaatgtttaaagaaataaatttaaggaatcattcatccttacacaaactattttacagtctcggatttttaagccgaaaaagataaaaagcacaaaaaatgattaatttttattaaaacaacggtgtcttactaaatttcgtagtaagataaattaccgtaatgagaggagcagaagcgcgtggaacacactaaatctttttttaggtggctgacacagactaagttaggcttttttacgattgttttagtcttgttttggcttaaaacttattttatctatttaactaagtttaatttaggagcagttggtccaatgcagcaatttttattgctgattaatccgattccttcagggatgcttttgctgggaattgggctattttttaaaggacgtaaatcctattggattattttagttatcgattttttgctaacactgtggttatttgccaatattttatattatcgcgaattttcaaactttttgtcattttcaattattaagacatcaggctcgacttccgataatttgggtaaaagtattgcaggaattacactagctagcgattttttagcttttgctgatattgctgtaattatcgtgttattggcgaccaaagtaattaagatggatgttcgtccactgaagctaaaagttaatttgttaattgaggctttggctgtcagcttaatgggactgaatttattgatggcccaaaatgatcgttctggacttttgacgagaacttttgataataattacatcgtcaaatatctgggaatcaatgaatacgctatttatgatggctataagacagcacaaactagtgcacagatggccaaagctaatgtttctgatttgaagtctgttagaaactatttaaaagaaaattacgttaaacctaatcccgcttacaccggcgtggctaaaggaaaaaatgtgttaatcatccatttggaaagttttcaacaatttctgattggctacaaatggaaaggtaaagaggtaacgccaaatctgaataagatttatcatcaaaaagagaccattagttttgataatttctttaatcaagtaggacaaggcaagacttctgatgccgaaatgatgcttgaaaattctttatacggactacaatcaggtagtgcaatgtctacgtatggtacttctaatacttttgaaagtgctccagccattttgcatcaacaagctggttatactactgctgtaatgcatggtggtgctggctccttctggaatagaaataatgcttataagtcatttggctaccaatactttatgccactgtctttctatcagaacaaaccaagctactatatcggatatggcttaaaagataaaattttctttgatcagtcaatcaagtacattgagcgtttaccacaaccattttatttaaagatgattactgtaacgaaccactatccgtataatatcgataaaaagaatcagacgattgataaaacgaatactggggatgaaacagttgatggttatgtgcagaccgcgcattatttagaccaagcaattggtgaatttatgcgttggatgaagaagacgggcctagataagaagacactagtagtattttatggtgatcactatgggatttcaggtaatcaccataaggctagtgcagaattgcttaagaaagattcgtttaatgactttgataatttgcagttccagcgagttcctttgatgttccatatgaaaggactaaagggtggcattaatcacacctacggcggtgaaatcgatgttttaccaaccttactgaacttgctggggatcaaagacaaagatacgatccaatttggctatgacttgctaagcaaaaatgcaccgcaaattgtagcacaaagaaatggtgactttatcactccggaatattctaaggtgggtagcgattattatgacaccaagacgggcgaaaggatcaaacctaataagaaattaaaagaaaaattaactgcaatttctaacaccgtaactacacagctgtctttgtcagatcgtgtaattaatggcaatctgctccgattctataaaccaaaagggtttactagagtcaagccgaaggattacgactataacaaggcgccatctttaaaacgtttgtttgatgatccaagcaaaacttcactgtggtatcaaaatcatcgtaaaacgacgcaaaaagatttcaagacagatgcgcctgaactaaaaaaataactgcaaaaactagtaatttgtgataaacttggtaagtaaatcgtatgtgtgtattggaggcagcgcattgtataatttagttatgacgctactaatcattgtttcaatcttaattgtcattgcaacaatgatgcagccacaaaaacaacaagatgcattgaacgccttatctggcggtgccgtttttagtgggcaaaccaaaaaacgtggttttgaagcatttatggaaaaagtaacctcagttttattggtactctttttcgtctttgctattatcttagcttatatgtcttcaaaataaattttgtacctcccgatcaaaatatgattgggaggctttttttattaaatttaaagatcggagaataactgcatggcacaaaacgaaaaaattttggccggcgttttagaaatttttcgccataatccacaaaaacaatttcgtgtagatcaaattgaacgtgaagcacgtcgtgatagattaggtaattttactgaattaattaaggctctttcttttttagagcacgataaaaagattattacagatggcaaaggacaataccaattagctcaagaaaatactgaagttgaaggtgaatttagagctaatgataaaggctttggctttgttagattagatgatgaaaatgcggacgacgtctttgttgccgcagattataccaagtatgccgttaatggtgaccgagtaaaagtaaagatcactgctggtggtaatccttggaatggtaagggaccagaaggtcaagttgaagagatccttgaacatggtttggaaacgttagttggtgaatttcatccgctaactgatgaacaaagaaaaaacagtcattttatcggctatgctttgagtaacgataaaaagttgcataaataccgggtttatttgtctgaaaatggcttgatccctcaaatgggcgatatggttaaggtctcaattaaggattatccagatgaggaaaatcctgagtcaatgactggtgcagtagtcaacattattggtaataaaaatgaccctggtgttgacattatgtcaattgtggcagcacatgatgtaagaactgaatggcctgaagatgcaatggcgcaagctaatgctattcctgatcatgttactgaagaggaaaaaaagggtagagtagatattactgaccaacctgcagtcactatcgatggggatgattctaaggactttgacgatgctgtagttttatggaaaaagcctaacggcaattatcaccttggtgttcacattgcggacgtttctcactatgtgacagaaaatacgccgttgaacgaagaggcatttgctcgtggcaacagtacttacttagttgatcgggtaattccaatgctgccatttagactttctaatggaatttgttccttaaatgaaggcgtggaccggcttgttttgtcatgtgacatggaaattacgccagaaggtaaaagagtaggttataaaatttatccttctgttatgcgctcacatggtcgaatgacctacaacaaggttaacaaaactcttaagggcgaaatgaatggtttagaggataagtatgttaaactccgaccaatgcttgaagaaatggcagatttgcatgctgctttgtataaacaacgtcatcaacgtggtgctattgactttgaagaaccagaagcaaaaattattgttgatgatcaaggcaagccaacagatattgttttgcatgaacgtggtactgccgaaaagatgatcgaatcatttatgttaatggctaatgaaaccgtggccgaagatttcttcaaaaagcatgttccattcttgtaccgtgttcacgaaacaccagatgccgaaagaatcaagactttctttgaattttgtagcgcatttggcttgaatattcatgcggatccaaataacgttaagccaattgatttacaaaaagtagtttctaaaactacagatactccagaggaagctgtagtacaaatgatgatgctacgtagcttaaagcaagcgcattattcagaagaagcactgggacactttggcttagctgcagaatactatactcactttacttcaccaattagacgttattctgacttgatggtgcaccggatgatccatgcatatcaagaccaggggactaatgaagaagtgcaaaagcattttgctagttacttgccagatgttgcagaacaaacttcaacgcaagaaagacgttcaattgatactgaacgtgaagtaaatgacttgaagatgacagaatatatggccgatcaagtggggcaacactttgacgcggtagtatcttcggtaactagttttgggatgtttattcaattaccaaatacgattgagggattaatccatatttcgaatttgactgatgatttttacagttttaatgaaaaagcattgacgctaactggtcgaggtactcataagcaatataaggtagggatgccaattaaggtaaccttgattaatgctaacgttgaacaacatcagttagactttgaaatatatgatcctaatgcgcctaagcataagcataacgatcgcggaatgaataatcgtcgtcgtggaaaccgtggcttccgcaataatcatggacgccgtggtggtcagtttaataatcacagcgatcatggccgtggccgaggtaatggaaaccgtggaggtcggagaaattttaaacattagggattgatcttaatgaaaaaagaaaaagaagataatttaattgcacaaaataaaaaagcacgacacgactattttattaaggaaacattggaagcaggaattgctttaactggaaccgaaattaagtctgtacgagctagaagaatcaacttgcgggatggttatgtgcagatcgtcaacggacaagcctggctagaaaatgttcatattagtgaatataagcaaggcaatcggtacaatcatgagccactacgtagtcggcgccttcttttgcataaaaaagaaattgcacgtttggccaaagcacaatcagagcgtggtattgcaattattccacttaaagtgtatttaaaacatggctttgccaaggtattgattggtgttggccaaggtaaaaaggaatatgacaaacggcaaacaattaaagaaagagaccagaagcgcgatattcgacgcaagtatggtgtctaagatgagtctgagaagaatctcagactttttttgttgaaaaattttaaaaagttttttttattttcacaaagtaatgttcgaacaatttgaagaatgcagagaaaatcaagctaaatatttttttaattattatagaggcgaataatagtattaagatacgtttgatattgaaatattcatattaaaaatccgaacgaagagcaagacttgccaaagcggagaaaataaggtaaattaataaagtcgcttcgagagatgcgacgagagcttaaaaacagacatgcaaggaaagaaaacaaataaaaagaaaaaagtacttgcaaagaagtaaataagctggtaatatatttaaatgtcgtcaggtgaaagcagaaaaagcttgagcaagacgaaaaaaacaaatcaaaaaagttcttgacaaagaaatgatggtttgataaaatataaaagctgtctgctttgcaaaaaagcaagacagaggtagtactttgaaaactgaacaaagtttcgctaaaagcgtgcgggtgtaaaaacccaaacaagaagcgaagtcaattcgcaagcaataaatttgagacaaagatcttaaataaggaatgagcaatcattcaaactttttaaaatgagagtttgatcctggctcaggacgaacgctggcggcgtgcctaatacatgcaagtcgagcgagcggaactaacagatttacttcggtaatgacgttaggaaagcgagcggcggatgggtgagtaacacgtggggaacctgccccatagtctgggataccacttggaaacaggtgctaataccggataagaaagcagatcgcatgatcagcttttaaaaggcggcgtaagctgtcgctatgggatggccccgcggtgcattagctagttggtaaggtaaaggcttaccaaggcgatgatgcatagccgagttgagagactgatcggccacattgggactgagacacggcccaaactcctacgggaggcagcagtagggaatcttccacaatggacgcaagtctgatggagcaacgccgcgtgagtgaagaaggttttcggatcgtaaagctctgttgttggtgaagaaggatagaggtagtaactggcctttatttgacggtaatcaaccagaaagtcacggctaactacgtgccagcagccgcggtaatacgtaggtggcaagcgttgtccggatttattgggcgtaaagcgagcgcaggcggaagaataagtctgatgtgaaagccctcggcttaaccgaggaactgcatcggaaactgtttttcttgagtgcagaagaggagagtggaactccatgtgtagcggtggaatgcgtagatatatggaagaacaccagtggcgaaggcggctctctggtctgcaactgacgctgaggctcgaaagcatgggtagcgaacaggattagataccctggtagtccatgccgtaaacgatgagtgctaagtgttgggaggtttccgcctctcagtgctgcagctaacgcattaagcactccgcctggggagtacgaccgcaaggttgaaactcaaaggaattgacgggggcccgcacaagcggtggagcatgtggtttaattcgaagcaacgcgaagaaccttaccaggtcttgacatctagtgccatttgtagagatacaaagttcccttcggggacgctaagacaggtggtgcatggctgtcgtcagctcgtgtcgtgagatgttgggttaagtcccgcaacgagcgcaacccttgttattagttgccagcattaagttgggcactctaatgagactgccggtgacaaaccggaggaaggtggggatgacgtcaagtcatcatgccccttatgacctgggctacacacgtgctacaatgggcagtacaacgagaagcgagcctgcgaaggcaagcgaatctctgaaagctgttctcagttcggactgcagtctgcaactcgactgcacgaagctggaatcgctagtaatcgcggatcagcacgccgcggtgaatacgttcccgggccttgtacacaccgcccgtcacaccatgggagtctgcaatgcccaaagccggtggcctaaccttcgggaaggagccgtctaaggcagggcagatgactggggtgaagtcgtaacaaggtagccgtaggagaacctgcggctggatcacctcctttctaaggaagcgaaggatatggagagcaggaatgctaagagaagtatccagagcaagcggaagcacactgagaaactttgtttagttttgagggtagtacctcaaagatttgaaaaacgccaagcgttagtcgggcctatagctcagctggtttagagcgcacgcctgataagcgtgaggtcgatggttcaagtccatttaggcccattgacataacgaagaaaaagagttaaagttatgtctggccgaaaataaaatactctgggggcttagctcagttgggagagcacctgctttgcacgcaggaggtcatcggttcgaacccgttagcctccattgatccagaaaaaggatcaaagagctagtacattgaaaactgaatataatccaagcaaaaaaccgagacaatcaaagagaacagattgtagagcgaccgagaagagaattcttgagtaaggtcaagtagaaaagggcgcacggtgaatgcctaggcactaacagccgaagaaggacgtgacgaactacgaaaagcttcggggagcggtaagtacgcagtgatccggagatatccgaatgggggaacccaatgcagagatgcattattgattagtgaatagatagctaatcaaaggaagacgcagtgaactgaaacatctaagtagctgcaggaagagaaagaaagatcgatttccttagtagcggcgagcgaagaggaaagagcccaaaccaagtgatttatcatttggggttgtaggactgcgacgtggcagtgtaagagatagttgaattatctgggaaggtaagccagagagggtgagagccccgtaagcaaaatctcaagcacgcctagcagaatcctgagtaggccgggacacgaggaatcccggttgaaaccgcgaggaccatctcgcaaggctaaatactagttagtgaccgatagtgaaccagtaccgtgagggaaaggtgaaaagaaccccggaaggggagtgaaaaagaacctgaaaccgtgtgtctacaagtagtcaaagcacattaaagtgcaatggcgtgccttttgtagaatgaaccggcgagttacgttatctagcgaggttaagtcagaaaagacggagccggagcgaaagcgagtcttaatagggcgaaaagttaggtgacgtagacccgaaaccaagtgacctacccatgaccaggctgaaggtgtggtaaaacgcactggagggccgaacccacgtaagttaaaaattgcggggatgagttgtgggtagcggtgaaattccaaacgaacttggagatagctggttctctccgaaatagctttagggctagcctcgtggagaggataatggaggtagagctctgtttggactaggggcccgtcaggggttactgaatccagataaactacgaattccagatatccatacacgggagtcagactgtgagtgataagatccgtagtcgaaagggaaacagcccagatcaccagttaaggtccccaaatctatgctaagtggaaaaggatgtggagttgcgtagacaactaggacgttggctcagaagcagccatcattcaaagagtgcgtaatagctcactagtcgagtggcgctgcgccgaaaatttaccggggctaagcatagtaccgaaactgtggatgtgttttaaagagcacgtggtaggagagcgttctaagagcggagaagttgaatcgagaggatcaatggagcgcttagaagtgagaatgccggtatgagtagcgaaagataggtgagaatcctatccgccgaaagactaaggtttcctggggcaggctcgtccgcccagggtaagtcgggacctaaggcaaggccgagaggcgtagtcgatggataacaggtagagattcctgtactgtgtcaaatcgttaagagcgaaggagggacgcaggaggtgaagcacgcatcgcgatggaacgatgttcaagcaacaagtgcggttaagagtcaaatgcttctaaccagcaacacgagttgtgaagaggagtgaattaaaagtagcgaaggtgtggtaatcacactgccaagaaaagcttctagccagagatgacatacccgtaccgcaaaccgacacaggtagtcgagtggagaacactaaggtgagcgagagaactctcgttaaggaactcggcaaaatgaccccgtaacttcggaagaaggggtgctagccaagagattggttagccgcagtgaataggcccaaacaactgtttatcaaaaacacaggtctctgcaaaatcgtaagatgacgtatagaggctgacacctgcccggtgctggaaggttaagaggagagcttagcgtaagcgaaggtttgaattgaagccccagtaaacggcggccgtaactataacggtcctaaggtagcgaaattccttgtcgggtaagttccgacctgcacgaaaggtgtaatgatttgggcactgtctcaacgagagactcggtgaaattataatacccgtgaagatgcgggttacccgcgacaggacggaaagaccccatggagcttcactgtagcttgatattgagtatcttttaaacatgtacaggataggtaggagccagagaagataggacgctagtcttattggaggcaatgttgggatactacccttgtttgaaggatgctctaacctcgacctgtaagccaggccagggacagtgtcaggtgggcagtttgactggggcggtcgcctcctaaagtgtaacggaggcgctcaaaggttccctcagaatggttggaaatcattcgcagagtgtaaaggtataagggagcttgactgcgagagagacaactcgagcaggtaggaaactaggacttagtgatctggtggtaccgtatggaagggccatcactcaacggataaaagctaccctggggataacaggcttatctcccccaagagttcacatcgacggggaggtttggcacctcgatgtcggctcgtcgcatcctggggctgaagtcggtcccaagggttgggctgttcgcccattaaagcggcacgcgagctgggttcagaacgtcgtgagacagttcggtccctatccgtcgtgggcgtaggaaatttgagaggagctgtccttagtacgagaggaccgggatggacgcaccgctggtgtaccagttgttccgccaggagcatcgctgggtagctatgtgcggaagggataagcgctgaaagcatctaagtgcgaagcccccctcaagatgagatttcctttgcgtaagcagtaagacacctcagagacgatgaggtagataggctgggagtggaagtcctgtgaaggatggagcggaccagtactaatcagtcgaggacttgaccaaagcgaagcaaactggaaggttttttgcgagaaggattatgtttagttttgagtgtaaaagctcaaaagagtacggtggcgaaagcaagaaggatacacctgttcccatgccgaacacagaagttaagcttcttaacgccgaaagtagttggtgggcaactgcctgcgaggaaaggaagctgccgtgctcttttttaatattccggcttagctcagttggtagagcgcttgactgttaatcaagatgtcgtcagttcgagtctgacagccggagtactttgtatggaatgttgtccgagcggcttaaggagcatgattggaaatcatgtatacgggcttatacctgtatcgagggttcaaatccctcacattccgtaaatatatatgaattggaactatgttaacatagttcctttttttctacctaatttttcatatataatggagaaagggaggaaatatcgtgaagctacgaaaactaattccatttttatttttaatatctctattagctataacattttccgcttgttcgacaaagggagaagagaatactgctaagcatagagttaatattgtaacttctactaatatttatgcagatattgctaaaaatatagttggtaaacatggtcatgtacaagctattataaaaaacggcgatacagatccacatgattttgagcctacgactggctctgccaaagaagtagctaatgctaatattgttattgccaacggtctaggatatgatgactggatgactaatttagccaatgctaatgatattcatgtggttaaagttggtaatcaattgatgggattaaaacagggggataatcctcatatttggtataacttaaacatgcctaaaaagtatgttgattatctagttaaaacagcaagtaaaattgatccaaaacatgcagcatattttaagtctaatgctgcaagctatttgcaaaagattgatagtataaagaaaattgctgctaaaattaatgggcgtgaagataaaccggtttatgttagtgagcccgtgtttgattatgcactagaacggtgtcattttaagattggcaatcaggcatttgaagaagctgtagaaaatgaaacggatccgagtgcgcaagttattcatgagatgcaagtcaaaattaaagctagaaaaattgctttctttgttaataatattcaagcatcaagtagtacagttagtggcatggttaaactagcagagcaacataatattccagttctcgatgtaagggaaacaatgcctaatggaattagttattattactggatgaaagcgaattatcaaaaattatttgaaatttttttaaaataactattgcataattagggactatcaggtaatataataagcgttgtgattgagagatcacggtggtaataactaataaaaataaataaaaaaagttcttgacttttaaaacatgattagttattataataaagtgctcttgattaagagatatgacccgttggtcaagtggttaagacacggccctttcacggccgtaacatgggttcaaatcccgtacgggtcactaatggaggattagctcagctgggagagcatctgccttacaagcaggaggtcacaggttcgagccctgtatcctccattgttcgggactaccgctgccgcggtagtctttttttatgcaaaaagaacgaacaagcaaaattattattttatcggttcaagtcctgagaggattcactatgattagtgaagatgccttgtaaccgaatagccaatgtctatatagggggactaatatggaaagacgtttgtttacttcagaatcagtttctgaaggacatccggataaagtggctgatcagatttctgatgcaattttagatgcgatgttaaagaaggatcctaattcacacgtagcttgtgaaacgatcgtaactactgggatggtttttgtctttggtgaaatttctaccaacgcttatgttgatattcaagatgtagtgcggaagactattttgaagatcggctatgatcgtccagaattaggttttgatggcaataactgtgctgtgatggttgacatcgatgagcaatcacctgatattgctggtggggttgatcactcacttgaaactagagaaaacaagtctgataacgatgaattggatcaaattggtgctggtgaccaaggtttgatgtttggctttgcgattaaagagacacctgaactcatgccattaccaatttcgcttgctcatcgtttaatgagacgtgttgctgctttgagaaaagaccatactttagattggcttcgtccggatgctaaggctcaagtcactgttgaatatgatggaaacaataagccattaagagtggatactgttgttatctctactcaaactgatgcagaagtttctaatgaagaaatccatcgggcaatgattgatttagtcattaaggaagttattccggccaagtacctagatgaaaagactaagtttttgattaatccgtcagggcgttttgttattggaggtccaaagggcgattctggtttaactggtcgtaagattatcgttgatacctatggtggttacgctcgccacggcggtggcgcattttcaggtaaggatccaacaaaggttgaccgttcagctagttatgcagctcgttatgtcgctaaaaatattgtggctgccggccttgcttatcgctgtgaagttcaattggcttatgcaattggtgtagctcacccagtttcaattatgattgatactgcgggtactggtaaggttgacgatgatttgttaactgaagcagtacgcaatgtttttgatcttcgtccagccggtatcattaagatgcttgaccttcgtcgtccaatctatgaacaaacggccgcatacggtcactttggtagaacagacgttgatttgccatgggaaaagactgataaaacacaagatttgcttgattatattaaaaataagcaataaataaaaagaggaagtaaaaaagaatgaaaaaaacaaacgtgcctatagtcacgcttgcgatttttatgacaacttttatgactgccattgaagggacaattgtttctactgcaatgccaaccatagtttctgacctagatgggctcgagattatgaattgggttatatcaattttcttgctaatgacggccgtttcaactcctttatatggaaaactggcggatagcattgggcggaagccagtttttttgtttggaattgcgttgtttgtcataggctcatcgctgtgtggacttgcacaaaatatggtggagcttatcttattcagagtaattcagggattaggttctggcgcggttcagccagttgccatcaccattattgcggatttatatgctctgcaaaaaagagcgaaaatgttaggtcttaactctggtttttggggagtagcatcagttattgcaccgctattaggtggctttatagttcagcatctatcctggcactgggttttctacatcaatgtgccaattggaataattgcctttttgctcgtaattttttgtttgcaagagcctaaacatagctctaagtctaagttagatttgcagggaaccatttggttagtaattttattgctagctttgatgtttttcttacaagatttaggttcaaacactaatatcgccataatggccgctctagccgttttagtggtaattagtataattatgttctttagagcagaaaagcgcgcagttgatccaataatgccactcactatgttaaaagataaggagttccttgcaattaacctgattacgttattgatttctggcgtagtaatcggctttgaattttacattcctacctggatgcaaggtattaatggtactaatccatctctagccggttttgctgtaacgcctagttcattaatgtggattgtgggttcattcttgattggtggaatgttcggccgctgggggattaaaaagacatatgattatatgttattggttttagttgtggccgatttggttttgattttagtgccgatttacacatcattctgggtcttctgtgttattgctgcctttaatgggaccgcctttggtgcgattacgacagcttcacaggtgagatcgcaggttttggtacctaaggatgacataggtgttgccacttcgtttaatacgctgatgaagtatctgggacagacaatgatggtttctatctacgggattgcttttaatacgatgttggcgcatgggttaagcaagagaccggggttgaatcaagaaatgatgaataaaattgtttctgcagaaaatgccaaaagtctggctgccaatgtagtgccacaattacggcaagttttgttaggcgggttaaaagctgtttacgttgtttctatgattgttattgtagtctcgattgtattgaatcaattgtatcgagatcgaaaattgaagaaaaattaagttgaaggagccacatgcaaagtagagcatgtggcttttttctaccaaaaaatttattatttgataaattttaaaagaaaatatgaatttttaatttataaaaaagcaaaaaataatattttatgattaatattgaattattatttcaaatgtaatatcataagacatgtaagggcttacacacaaaaagatgcaagctaataaatcaactattttctataaggagggtaagacgatggctgataagtattcagaattaggtcgcgagatttatgcaaatattggtggacctaataatgttaagtcaatgtatcattgcatgacacgtctgagaattaaaattcgtgataactctaaggtagatattcagggtctgaaagatattgacggagttttgggcgtagtaaatgcggacacgttggaaattgtccttggttctggagttaatgctaaagttgcacaagatatggttagccaagtgggagttaaagaaaacgaagaattcccaactaacacttaccagagcgaaaagtctgaagttcaagcaaaagctgcagaagtacatgctcaacataaagcacagttgaaacaaacatggtggcgtaaggctttagaccatatttccgctatcttcattccacttattcctgcatttattggtgctggtttaatttcaggtgttgctggtatccttcgaaatatgttgacggctaagatgttgcctggtagctggaacttaggcgttactattctcagtatgattgctagtgcattgtttgcatatttgaacatttatgtaggtattaatactgctaaagaatttggagctactcctgctctaggtggtatcatcggcggtgtcgttttgcttcctgggattgctgcaccggttactattccaaatgtattagatggtaagccactagcagcaggccaaggtggtattattggtgttttacttgctgtatggcttttggcttatgtagaaaaatggttccataaacatattccagattccgtggatattatatttacgccgttctttactgtcctgattatgggactattcacagtatttgcaattatgccgattgctggttggatttctaattcattagtaggtggtattaattgggtgctcgatgttggtggtcctgttgctggattcatccttgggttgttcttcttaccaatggttatgctcggattacatcaaatccttacaccgatccatttatcaatgattcaaaaaatgggttatacaccattacttcctattctggcaatggctggtgctggtcaagttggtgctgcaattgccctttgggctaaatgtcgtaaaaacaaggatttagtaagattgattaaaggtgcgttacctgtaggtattttgggagttggtgaaccattaatttatggtgttactcttcctttaggtagaccatttattactgcctgtgttggtggtggtattggtggtgccgttgttgccgcatttggtcacgttggttcaattgctatcggtccttcaggtgttgctttaattccattaattgctaacaacatgtggtgggcatactgtattgggcttttatccgcatatgctggtggatttgttgcaacttatttctggggtgttcctaaagatgctattaaaggcaaagttgaaaatcctactcctgaagtttccgaaagaagagctgctgaaaagcatgctgataatttgaatatgcctagtgaaaaggttgaaatttcttttgaagctcctgtttcaggtgacttagaaaaaattgaagaagtaaaggatgacgttttttcacaaaagatgctaggtaatggttttgctattgatccttcaaatggtacagtggttgcgccagtagacggtaaaattgatacagtaatgaatactaaacatgcaattacattgaaaactagtaaagggaacttagatgttttaatgcatttaggattagatacagttgaattaaagggtgctccatttgaaattgacgttaaaccaggtgatctagttaatgctggtgaaaaaataggtacaatggatatcgctgcaattaaaaaggcaggaaaagacccagtggttttaactattattgctaatatggatcatattgatcaggtatcaaaagtagaagattcaccagttaaggcaggtcaagttgtctttaaggcaatgacaaaataatttttagaaagaaaatgatataaatgtcacttgaaaatttgactactgagcaacgaaataaaaatactatgcatattgattctatgtctacattagatatggtaaagacaatcaataaagaagataaaaaagttgctgaagcagtaggaactcaagatgaaaaaattgctcaagcgattgatattggctcagcacgttaccaacaaggtggcagattgatctatattggcgcaggaactagtggaagattaggtgttttagatgcggcggagcttgtcccaacctatgggatcaaaccagaacgtgcaataggtttgattgctggtggtaaaggcgcaatgtatgtagctgttgaaggagcagaagatgatcctaaattagcagctgaagatcttaagaagcttgacttatcagaaaaagatgtagtgataggtttagcagctagtggtaggactccttatgtaattggtgggcttgattatgctcaaaaagttggtgcagctacaattgcagttgcttgtgttaagcatagtttgattggtcaacatgcaaatgttgcgattgaagctgttactggtgcagaagtaattacaggttctactagaatgaaggctggcactgcacaaaaaatgattttaaatatgatttcaacagggattatgattcgccaaggtaaggtatatcaaaatgtaatgattgatgttttgccaacgaatgaaaagttagttgaacgtgctgaaagaatcattcaaactactacaaatgtttccttagaaaaagcagcaaaaattttgagggatgctgataaagatgttggtttagcaattgtaatggccaaaacgggtttgaaaaaaaatgatgcacaattgttgctgaaagaacatcagaataatgtaagtagtgtcttgaaagaagaatagatataaattaaggataaggaagagtggcagtaagtaatttaatttcgctgattgaagaaagaagacacattatgaatagcaagaagttaattactggaggttgtactgtagcattatcagtgatgatgttggcaagtactgttacatatgctcctattagtaactcacaggtgtatgcgagtgtggtaaaacaaaagcaagaaccaacaggtcaatatcaaattaatgatagttttcctattgatgaaaagaatgataatcccaaatttgatacttggtcattactagataatattaatcgaaagttttatggcttcaaaggtcaaggatcagtttgggtacacagtaataatgccaaaaattttgaattatatattaatggaaaaaatgttagtttaaaaaacattagtagtaataaatgggtaaaaattgatatcagtaaatttacaaaaaatggaaataatgctttacagatttcaccaaagaaaggtgttagagcaagcgataaatttgatattaaattaccttatcctacattagttgataaaactaaagaatatcggaataatgatacatttaaaactatggatgcactaattaattctgagattaagaatggatttccgtctgcagagttggttgttgtacataatggacaaatcattaagagaagtgcgtatggtagagtaaatgcatactttcaaaatggtaaacgccgtgttaatgctccaaaagttaccaatacaaccatgtatgatttagcttctaatactaaaatgtgggcaacaaatatggctatccagaagttggtttctgaaaagaaattaaatattgatgcaaaagtaagtagtatttttcctgactttaaagataatgctaatgataaaattaaaggcaagactgatttaactgtgcgtgatattttgatgcatcaagcaggttttccagccgatccacaatatcacaacaataactataatccggacaagcctaatgaacgaaagaagaatgccaaccctgtatatactcaaaatagagacgaagtattgaagaagataattgctactccattgcaatatgcgcctggaacaaaaacaatttattcagatgtagattatatgcttctggggttaataattgaaaaagtaacaggtcaacgagaagataattatgttgaaaataatatttataagccattaggcttgcgtcatttgatgtataacccattagataaaggcgtatctaaaaataaaattgcagccacagaattaaatggtaatactcgggatggacagattgattttaataatatacgtcactatacattgcaaggacaagttcatgatgaaaaagcatactatacaatgcatggagtaagcggtcatgcaggattgtttggcgatgcttcagatttagcggttttagcacaaatggtcattaatcgtggcggttatggtaatcacagaatatttgatgaagatactcttgatgaatttataaaacctaaatctacaaactatagttatggattaggttggagaagagaagcaagtactacttacagcggtaattatggatgggccttttcaggattgtccgatgcttcaactattggtcatacgggttggacaggtactttgaccgtagttgatccacacgataatactgcagttatcttgttaacaaatgaaagaaacactcctattcttaaacctgaaactactgctactgcaaatgactttgctggtggtcactatttgctatctaaatatggtgatattgccagtcttgcgttcgctgcaattaataaggacaattcatctgctaataatgccaagttaattagtcttacaatgcagagatttaacgaaattcaaaagaataaagatgatcaaacaaatgcagataaagcagacttatgtggaatttatgatgctttaaaaatgcgtagtaaaaagcataattctgtagcaagatttttagcgactacaaaaggaaagcaaattactgcatacgttaaggcaaataagaatgccgttaataatgttcgcaatagtcattaattaagaataaaagccattcaatatgaatgacttttattttattagggaggttagatgctaatgctaggaatatctgtatatttccaagattatgatgaaaactatttgaaaaaagcagctcaagctggtgcaaaatacgtttttacgtcacttcagattccagaagaagattattcagatctggatcaaaaattacctggattctttgaactgtgtaatgaattggggcttgaagtaattcccgatgtttctccagcaactttggaaaagctaggaattaaagaaggcgattttgaagctttaaaagataagggattcaaggctttaagattagattatggttttgataactttgatttaatcaaaaagctacaaaaaaaattctttattttattaaatgcaagtgttgtgtcactggattatttagatcgtgctagaaatgcaggagttgattttaataaattagctctaacgtacaatttctatccacatactgatacgggtatgggatggtcagattttaaacgtaaaaattggatgttgaaggattatggcttaaggactcaagcttttgttcctggggatgcacttaaacgtttcccactatatgaaggcttaccaactgtagaaaagcatcgtggagtttcaccttacgttgcagctgttgaattaattcatgaggcgaatgtagatgatgtgtttattggtgatagccaggcttcaatcaaaaatctccaatatattgtagattaccaaaaagagaagactttaaacttagaatgctctttattgccacagtatcaacaactgtatgatcaagtgatcgaagtaagaaaagatatgccagaaaagttgattcgattaagtttatctagaaagcctgatattccagtttgcaatactttaaataggcataggggtactattacaatgcaaaacaaattagctcaaagatatagtggtgaagttagtctgattaagtcaaatttacattttgaagcacgtagtaatgtaattggctttatttcacctgagtatgtgaagttgcttgattttattgattcgaatacaaaaattatttttagaaggctgacatagaagaaaggtgatattatgcttaatttggcgaataagatttcagatgtatatcctaatttgaataagacttctaagttaattgcagacgtttattttaaagaaccaagaatttttctaaataaaaatttacaggaattaggtaccattacccaaacaagtggtgcatcagtcgttcgcttttgcagaaaattgggtttcaaaggctttaaagattttcaaatagcttgtgcgcaagaaatgcctaataaacaagatgctatggtagatacgattatcaatacaaatgatgaaccaacaagcgtgctttataaattgcaacttagcttaggaaaaaatattgcagacattggtaaaacaatagatcataaatctttagatgctgcagtagatttaatgcgatcagcacaacagatatatgttgcaggagaaggagcatctggtcttgctgctcaagatttgttttataaattaattcgtagcggaaagaatgttaatttcgttcaaagttcacatattgctttagaacaagtagcaaatattaataaagaagatatactaatcgttttttcctacagtggattaactcaagaaccattgctaatggcaaagcaggcgcaaaaaaataatgccaagatagttgcagtgactcgtatacaagattcaccactaaagaatatggctgatacagtaattacattgccatcaaatgagaagttattgcgctatggtgctattaattcactatttgcagaaatctttgcttctagcttgctatatttgagtcttatttcgccaaatttaaaagaactaaatatgaaaatgaaaactacgcaaaatttgactaatcaattaaaagtgtagaatctataaaataacaactaaataaatttagaaaaatcaaaaatattttcatgatgaaaataataaaaataaagaagtgtctgggaaaaaactaattctcagacaggaaaaaagaacgatgatttcctaatcaatgtcattaagttaagctattgacttttgaaaactgatctttttaggaatcgaatcatttggattcgattcttttttttgcaaaaataaaggcgaaaagacaaacgaaatttaaaagccaagtctgcagtatattacatgtatcgcgtggcctaattaaaaaagaaatacaaactacgcttatttagcatacgcaaaaaagcatcaaattggctatctaaagccaaatgatgctttaattgtttttttctccaatgtcaatagcttaacttaatgacattgatttcctaatggatttcatcgttctttttctatactttaagtgccttccttgatattattgaatcaccacaaaacaaaaagaaagaaggcaatcttaatgtatcaaaattataccataggtcaaacagctttaacactcaacttagacttcgctattcctcataatcatttggctaataccattagctggtttgtcgattcaattccagaagatgtcttattgggtaatactgctaaaaccggtcgtccagcttatcatccagcgatgatgcttaaaatcttgctttttgcttattccagaagagtattttcaggcagaaaaatcgaattaatgctggaagaaaacgtgccgatgatggctttggctgaacaccaacagatttcttaccatactatcaataactttagatccagcaagcatgccaatgagctggttaagaaaagcttcctctactttaccaatttgttagaagccgagggccttatcaatgaaggagcgatctttattgatggcactaaaatcgaagctgacgccaatcgctatacttttgtttggcgcaaggcagttgaaaaatttcatgacaagctcaaaggtcaagcggttgagctttatgatgaattgattgccaaagaagtcgtcaaagcaatggcaaaagagaaagtccagaccagtcaaggtttggcagagctagcacaagaaacggaagccgagattgaaaagctgaccgaagaaattgagcaagaaccccaagcaatccctggcggttcgcctagaaaagcaagaagacgcggtcttaaaaagctgcttcataaactaagaaaagactatgttcctcgaatgaagaaatatgaagaggcgaaagaaatctttgcagggcgtaacagctattctaagacagatcatgacgcgactttcatgcatatgaaggaagatcacatgaagaacggccagctcaagccaggctacaatattcaagctgccaccactgatcaatatgtggttgactttgctttataccctaatccaactgatttcagaactttcgaaccatttttaaagcagatgacgacactagacaagtttgacaagattgtcgctgatgctggttatggcagcgaatataattattcaatgttagaagaagagtattcagacaagaagtactatattccttataccatgtacgaaaaggaaaagaccagaaagtatcgcaacgatccaactaagctggctaactggttctatgatgaaaaagatgattattaccttgatcaaaatggcgtcagattcaacttcaaatattatagtcaacgtaaagatcgatcgactggtcaggttcgtgattttaaggtctatgaagcagatgaatttcaactaacgccagaattagaacgcttagccaagactaagagcggacgccaacgtcaggttcgctataatcctaactggcaatacctaaaagaaaaagccaaagcagttctccaaagtcctgaaggcagacacatctacagcatgaggaaatatgatgtggagccgatttttggacatttgaagaacgtctttggcatgcgccgaactcatttaagaggcaaaaagaaggttgaaacagatataggaatagccttcatgatggtgaatttaagcaaatattggaacagaagatggtcaaaagaccaattttctttgttcaaaaataaaaatagacagaaaaagacggtcaagcaactcaaattaagagttggattgatcgtctttcagtatctaagggttagttttttcccagacactagtactttttttgcggttggaataaatctatatttgacaatgctataattataaatggaaagtggcctaaaaataagataacactattgaaagcgcattatttgcctccttgaaagtaaatctaagtagctgtacacttaaattgagctgaataacgaacgttatttttggcagagacttgtaatgcgagtaggaattatgggggcgtaaaaatggatattactagtttagcaagattccaatttgctatgacgacgatctttcactttttcttcgtgccattttcaattggtacgatattcgttgtcgcaattatggaatcaatgtatgttcatacaggcaagcctgaatataaaaagatgaccaagttttgggcaatgtcattaagttaagacattgacaaattgaatctaatctctgtagaaccgaatcattatgatttggttctttttttgcataaaataaaggagaaaagaacctaccttttcgccctctgattaaattattaaaccttcaaaattattgccagaaagctggtgttaattatgaaagcccttcacagaaatattttagatcgtcttgatcaaattatcaatgatactggaaagcatattcatgattttatcgatgatactcatgccttcactaggaagcggtttttagatgcagctacagtcattaaaactactattaatatgcaaggaaaagatttgaccagtgagttgtttagagcttttggccaaaaagctattaaaaataacgataaagtggtcagtacttccgcttatgtccaacgcaaaggtcagctttcacccgcatgttttaagcatattctaactgtatttaatcagaatttatttaatatccagttatttgatcataaatatcgtatatttgccattgatgggtctgattttaatcaaatctggaatcctaaatcagagaatatcgttggaaatctcaatcataaaggaaagccatattgccaaattcatgttaatgcactctatgacctgttaaataatacttatcaagactgcatctttcagcctaagtcaaagatggatgaacgtaaagccgccgttcaaatgcttaaaaagctaaattgcggaccatatatagttactatggatcgaggttataccggctttaacatgattgaaaattgtaatcgcctgcctaactgttattatgtcatacgtactaaaacgggatatggcgcatttaaggaagtagctgagttgcctaatcaagagtgtgataaggatatagcttgctgggtgactacctctaattattattatgaaacccataaggctacagaaaacgttcatttggttaaccatcattaccgtcaatatataaaatatcggtctaaaaataccaaagatggcagctgggactttggagagttatgtacaataaaatttcgtgcctgtaaatttagaattaatgatcctaaatcaggcaaagaagaatgggaagttgttctaactaatctaaatagagccgattatcccttaaaaaggatcaaagaaatctaccatttgcgctggggcattgaaacttcattcaaaaagttgaaatatgctttaggtagcgtacagtttcattccaagcaggatagatttattgaaatggagatctatgcccacatgattatgtttaacgcagtcagtcaaattgatgctcaagcatatgtaccacaaaaaaaatgcaagtatcaatatgcgatcaatttcaaacagtcatgttttgtcatccaggctatgtatataatttcttcttcaactgaaatctttaaaaagattcttattcaaattagtcattacacaattccgatcagaccaggacgaaaagacaaaagaaatctcaaacccaaatcagctgtatattatttatatcgtgtagcctaatttctaaacaagatttaggtttatttggcatgaaaaagagcattcaaatgcgataaatcgcaaatgaatgatcttaaaagtccaagtcgataatttgtcaatgtcttaacttaatgacattgaagttttgggctaatatctttttattgagttttgccgttggtgttgtaaccggtatcattcaagaattccaatttggtatgaattggtccgattattctagattcatgggggacatctttggtgctccacttgcttttgaagcattgttgtcattctttattgaatctacctttattggtttgtggatgtttacttgggataaagtggggaagaaattacacttattctttggatggatgatcgtctttgggacaatgacttctgcattatggattttaacagcaaactccttcatgcagcatcccgtcggctttgctttacgcaacggtcgtgccgaaatggctgactttggagcacttcttaagaatccacaattaatgtatgaatatggtcacgtaattgttggtgcacttttaactggtactacaattttgactgggttagctgctttccaactattgaagaaacgtaacctttcagacattaacaagaagatctatcgtaagacaatgcgtttaggcttaatcttaatgttaattttctcagctggtgaaattgctgtgggtgatatgcaaatgcaatatactttgcatgatcaaccaatgaagttcgccgcaactgaagctgtttataagacaactggagaaaaggctccatggacggtagttgcaattgctaatccaaagacccatgaagttaagggaattgatattccagacatgttaagtattctttcttaccacaagactactggttctgtaaaaggtatagaagaaattaacaaagaacttgaaaagaagtatggtacacatattgatggtcgcaagatggactactatgtaccagttaatactttattctggtccttcagagtaatgtgtggttttgctgcattattattcttgatggcaattgttggtttaatcatgactcgtaagaataaagaaaccctttataaccatcgttggctattatggatcttcgcacttcttacattctcaccattcctggtcaacactgctggttggttaatcactgaactaggccgtgcaccatggacagtttatggtctattcactattgatcaaagtgtttcaccgaatgtttcagtggcttcacttttgacttcaaatattgtttacttctgcttgtttactgttttggcaattatcatgattgcattggttgttcgcttcttgcacaacgatccagatgaatatgataaggctcaagaggcaagcaaagtagttgatccgttctcaaagggggccatctaaaatgtcatttttacaaatactttggtttatcttaattggagtattgttctcaggcttcttcttccttgatggttttgactttggagtaggaatggccgtgaagactttagctcataatgaacctgaaagagatcaagttgttaggacaatcggaccagtttgggatggtaatgaagtttggttgattactgctggtggtgcaatgttcgcatcattcccatactggtatgcaaccttattctcaggttactatttaattttattattgatcttagttggcttaattattcgtggtgtgtcatttgaatttagagcaaaatgtgctccatatcaaaagcatatttgggataatgcaatggcgatcggtagcgtaatggccacctttctctttgggataatgtttatctcaatgattaaagggatgccaatcgatgctaaaggcaatatttcagctagcttctttgactactttaactggttctcaatcgttggtggtattgctttaacacttctttgttatttacacggcttaaactatattactattaaaactaagggcgttatttcagatagagcacaaaactatgcacaagctttatactgggtactctacgtcggtgaagtggtctttgctttattattgattttccaaaccgacttcatgagagtacatccaattgcaactttagtatgcttagcattaattgttggtttctctgtagcagcacatgtagctactttcactaacaagcaaggaatggctttaacttgcagtggattaacgttgatctcattggtcgccttaatcttctgtggtttattcccaagagtaatgatttcatcaatcagcagtaaatatgatttgttgattcatagtgcatcatcatctaactacactttgattgttatgactgttgctacttgcatcttggtaccatgtgtcttggcttacaccatctgggcatattggatttttcgcaagcggatttcaatgccaagaatcggagaggttaaataatgattgataaacagctatttaaaattgatggcgctggttcaatcttaaaaaaacttgcagggcttgagattctgcaagctttttttatagtaggacaagccttggcactagcgtcagtcttaagcaaattgtgggtaggtcaacctctcgattggctactactaattacttttgcagcttgctttatcgccagacaattgatcagcacactgagagattcaatgttagaaaaatattccggtcgggttgcagaagaattaagacagcagcttttaaataaagtctttcgtgatggacaggctttagtacaaaaacaaggaaccggtagtttgattactatgtccctagatggtgttgatgaggtcaggcaatacattaagttaatctacagcaaagttttaacaatgatgattgtgccagttttaatctttgtcggcatgctgtttttaagctggacatcagctgtgattctgctagtcatgtatcctttaattgtcttattcatgattatcctaggtcatgctgcacaggatcgagcaattaaacaatttggtaactttcaggttttatctaataactttattgattctttaaggggaattgatacgctgaagtatttaggcctgagtaaaagatattccaagtcaatttttaacttgagtgagggttttagaaaaaagacgatggcggtgctaaaagtagcaatgctttcaacttttgccttagactttttcactaccttgtctattgcaatcattgctgtttttcttggttttgacttgatgaatggtaaaattgcactttttcctgctttaggaattctgattctggcgccagattattttttgccaattcgagattttgcgggggatttccatgcaaccttgaatggtaaaaatgcctttaagcggatcaacgaattgattaatctgccagaggaaaaaactaatgatttacctttaaaaacttggtcagctcaagatcaattgaagatcaagaacttgaagtttacttatcaaaagggaaccgaaattggaccggtttcattacaagttcaaggattcaagaaaattggcattatcggaatgagcggatctggtaaaactagtttaattaacctgctcagcggctttttgactccggatcaagtgcaaattgaactacaagggcagaaaactacgaccatgaatattcctgcttggcagcgtcaaatgacctatattccgcaggagccatacgtttttactaagagcttgcgtgaaaatattgctttttataatccgcaggcaagtgatgatgaaattaagcaggcgattcatatcatgggtctggatgccttgttaaatgatttgcctaacggacttgatacggtgattggccgcggtaagcgtgtcttgtctggaggtcagtcacaaagaattgccttagcgagagcatttttggatcctaagcgaaaaattatgatcttcgatgagccgactgctcacttagatatcgaaacagaaattgacttaaagaagcggatgatgccattaatgcaaaataaactggtcttctttgcgactcacagactgcattggttaaaagaaatggactatattctagtgatggatcacggtcaattggttgagcaaggaagttatgagcaattgcagcaaaatcaaggctacttctgcaagttaatggcaggaatgagaggtgaaaacaatgatcaataagattccggttttaagagcattaaaaaatgatcgttgggttcgcccatatttggaaaaatatcgtaaaacgttgattttggcgattgcactgggcattttaactttcgtctgtagcgggggcttgatgttctgtgctggctatttaatcagccgttcagcagctaaacctgaaaatattttgttaatctatgtgccaattgtcttaactagagcatttgggattacgcggccagctgtccgttattttgagcggctggttagtcacaattgggtgctcaaaatgacctccaaatttagacaacagctttatgactcattggagcgcgatgcgactatttttaatagtaagtatcagctaggaaatattctgggacttttgtctgatgatgtcagccatattcaaaacttttacctaagaacgatctttccaatgtttgtagcttggggcttgtatgcaattatcgtaattggcttaggcatcatttccccactgatgggcatttggatgttgatcctgtttttcttgattatttttgctattcctatttggtcagtcttaatcaatggtgcgcggcaaagctatgaaaaaacggttcaagacaagctctacgttgatttgactgataatgtgatgggagtagatgactggattttgtctggccgcagcaaagaatacttggccttgcacgtcaatgatcaagataaatttttgcaaatcaacgcgaagatgaaaaaatttgatcgctggcgcgactttgttttacaaatcttctgggtgttggtaattgtgagcctagtaatttggggtgctgccagatttggcgggcgttcaacttattatactaattggattgcggcatttgctttggcattattcccgactgttgaggcttttgccagtttgccgactgctgctcaagagacgaatatctacaaagattcgcttaagcgtttgaataatttgccagctcctgatcggactaagcataaaccaatcaaattaaccgcaccgtttaatttagtattaactgatgtgcattatgtctaccctcaaactaataaagaggttttgcatgggatcaacttaaatatccatgatggtgaaaagattgctattttgggtcgtagtggtgcgggtaaaagtcctttagctgccttgctcagaggtgatcgggtaccagctaaaggacacgtaactttaaatggaattgataccagcaagtttggcgatcaaatgtccaattactttagcatcatcaatcaaacgccatatttgttcaataccacgattgctaataacttgcggttaggtaatgaagatgccacagatgaacaattatgggacgttttgcgccgagtaggtttggccgagatggtgcaaaaattaacggatggccttgatactaaggtagatgaggcaggcttacgcttttcaggtggtgaacgccatcgtttagccttagcgcgaatcttactgaagaatacgccaattgtcttacttgatgagccaacagttggcttggatccaattacggagcaagctgtaattaatatgtttattaaggaattatccggtaaaactttaatttggattacacaccacttgcaaggaattgatcagatggatcaagtaatttttattgaagatggacaaattaatatgcagggtacaccggaaaaattatggcagacagagccgcgttatcgtgaattgaaaaaggctgatttaggattatagaggttcattatgctaacgaataaagtgccagaacaagatgtgcatgacctatttactagggtcgcgcctaagtatgatttgatgaataatattgttagtttagggattcaaaagagttggcgtaagaaatttttacggcagttagatttaaataaaaattctatttgcttagatttgtgttgtggtagcgctgattcaactattgatttggctaaaaaagctaaattagtgactggtctagattttaaccaggagatgttgaagattgcccaaaaaaagattcgtcaaaagcagctgcagtccaagataaagttgattgcaggggatgcaatgaatttaccttttacggccaatagctttgattgtgtaactatttgttttggcctgcgtaatgtccctgacgctgttaagacgattcaggaaagctaccgcgtacttaagccgggcggacaatttgctgttttagaaatgtctcagcccactaatgcattagttaaatttggctggcaagcttattttaaaatttttccgtattttgctaagttgacacacggtaatatcaaggactaccagtatttgtcaaaaacaagtaaagaatttctctcggctgagcaattaaaaaagctacttgagcaaaatggttttactcgagtagcggttactaagttaacttacggtgcaggtgcgattcatttgggacgcaaagactaaagcgttcgattgactaatttacgcgtcatctttttgagcaagacggtcgcattagtttgcggcagttgggctaagttagctaatgcccgattagtgtattgttcagctaaggcatgagtttcttcaatgactgagctgtttagcaaaatcttttggatttgttcgatatcgtttttgctcatttgtcgctttttttcaagtagcggtactaattgctctcgtaattcctttttgctaagagctagcagaagaggtagagagtagacgccggtagtcaaatcttctagcgttggcttgttcaggtgcttaccgccagtgtaatcaagaatgtcgttaacaatttgaaaagcaatgcctaagttttcaccaaaggaggctagggcttgagtagtttgctcatccccattgccaaaatggcttccttcttcggcagctaaacgaaaaagtgcagctgtctttcctttaacattagttaagtagtcgttgaaatcttggcttaggttaaaacgttcagccatttggcctaattcaccagcaagtaaatggtgcattgtgtgagcatttttaatcatgtaatcttgttcggaaatggcgttcaaaattaggtcaaaaaagtgcgtaaaaagcaagtcgccagcgtaaactgcggtgtctttgccaaaacgggcttggatgctaattttaccgcggcgctcgtcagaatcgtcaatgatatcatcatgaattaatgaggccatatgcaaaatttcgattgatgaggcaagttgaataatttgttttgatacagtttcttttttgctagcaatttgagctgacaaaattagtaaactaggccgtaaatatttaccaccgttactagccatttcaaggagtgcatcttgcaagtctgaatatggagtgcggatggttgcctgaattaattgattaacttcttcaagcggtttacgaataagtggatatttttgccaaggttgagagttattcatgatagatttccttataatagagttaacagaatagtgatcctttgaaaggatgtggatcgatgtcattaagtgtatttttagaattaattgagattaaagcaaaaaccgctagtgtcattccctttttcttagggatgtgctacagcgtgtattattatcaccaggttaactggggatttgccctagtcttcttcattgcaatgctactatttaacatggtagtagatatgtttgataactactgtgattattatcacgcaaatagcaagaattaccaagagaagactaacattatcgggcgagaaaatatttcacctaatttagttctgggattaattatttcctttagtcttattgcaattttattaggtttgtatctagtcgctaaagtaggcttgcctgtattgtggatgggcttgttctgttttatggttggttatttatattcatttggttcgcatcctatttctagcttgccactaggtgaattgttctctggtttcacaatgggcttcatgattgtcctgctcagtgtttatatcaatagttttcaagcttttgattggaactggatcacaatcggtcgtatcttcttattagctttagctgatgaattatggatttctaatttaatgctagctaataacttatgcgatgcccaagaggacgaggataatcaccgcaccacaattattcactttattggtaaaaaaggtggcttgattgcttttagtgtcaaaaatattttagcatttttggtaatcttcctcctaccgttcttgggaattgctcctaagacggtttggttaacagtaataattgtaccgttcgtttataagcagaacaagatcttaattggcaagcaagttaagacagagacatttatcacaggagtaaaaacgttgctagttggttcactgacttacttaataacttactttttaggaattctattttagagaggttgaaaattatgaaaacagttgtagttttaggtgctggttttgccggcttgaaaacagttgtcgctttgcaaaagaagttgcgtgaacaagttaagattatcttagttgaccgtaatccataccactacgaaacaattcgcttatatgaagtggctactggtgaaattccctacactgggatgtcatatgaaattaatgatgtaattaatccgaagatgactactgtgattacggatgaagttgaaaaagttaatattgctgataaaacagttgagttaaaggatcatgctccacttaaatatgactattgtgttgttggcttaggctttaccttgagcaatatgggcattaaaggtgtaaccgaaaatgctttgccaatgagcaatgtaaaacaagctgaagctattcgcgaccacctttatgccgaaatgaaggcttatcgccaagaccatgattctaaacacctgtcagtagtaatttgtggggcaggttttcaagcaattgaattaggaaatgccattgccaaggttcgcccagaactagctcaaatggctggcgcccaaccagatgaaattaccatcagaatgattgatggttcgccacgtcttttgccaatgttccaaggtaaattgcttgattacgctttaaacacaattaagaaaaataaagtcgaaattattaagccagcttatgttaatgaagtaacctctacctcggttttgtataaaatggctaatgaaaaagacaatgctgagctgcaagaaattaaggcaggtactagaatctggatgatgggctttagtggcagtccagtaattgaggcatctggatttaagaaccgtcgtggtcgggtcatggttggtgatcatttaaccgcgccagaaagtgatgatatctacgtcttaggcgatgtttcaagcgtcatggttcctggtaagaaatggccatatcctaacactggtcaattggctctttcaatggctaactacgctgcaaaagatattaagagcagaattatgggtcaaactagaccggataaatatgcttaccatgacttaggtgtagtagttaacttgggtaattcagaagccgcaggattggcaatggggcatgcttttaaaggatactttgcagcaactcttaagaagattaccattgataagtcggttcttgaaactggtggtattaaagaaacaatggcgattggtcaatttgacttctatcactaaaattgaaaataaaagagaataaaaaatcacttcagtttgatttgatatgaaccccaaatttgggacatattattgaactgctttatttaaaaccatatttcgatattctatcggagtatggttttttagtactgttttaattctttcatgattgtagtaatgaatgtattaggactaaagtgtgaagttgcgccattttatgccacaccaagaagacctgctattcaccacactatgggtggcttagtaatcgacactaaggctcatgttttaaataaggacggtcaaatcatcgctggtctttattcagcgggtgaaaatgctggtggtatccatgccggtaaccgtttaggaggaaattctttagcagatatctttacctttggtagaattgctgccaatactgcttatgaggataaacatgttaccgatgttattactgacgcttcgcagaaataaagatagagtataaaaaaatacagatatatcaatttaaatattggtatgtctgtatttctatttggagtcatttttccttaccttcgaataaaaacccatgatttctaattcttactaacaaaaataatagtaacttttttctaacttcccaaaaaaattttgcgacttttttgcgtaataaataatagaggataaatatcctcaaattatttaaggaggactttgcatgagcaaagagaaagaactaaatgtgtctgaagcattaggttttacggatgatttgatgtttcagaatgttatgagagatctgtcgtatgttcttgaatgaggttctaccacatttggacattcaagatatcactgtccgcacgcaagaaaggattgcttttaaccaagaagagaaagtttcgattcttgatgtcctgattacggatagcagaggcaggcgttacaatgtggaaatgcaggtcgcgcataaagcagacatggataaacgagccaggcaatacctgttcaagatgatggaagatggctttttacgacgaaaacaagaatatggcgagctgcacgctgcatatgtaatttttattctgccgtttgatcccaaaggaaaaggcttgaagcgatatacttttgtttatactgctaaggaagacccatcagttgaattaaatgacgattctgcgttaatatatttaaacacaaagggaacaaaaggcgagatcagacctgagcttgatgacctttatcgcatgattgaaggcaagccaacttcaaatggaaaactcgtcagtcgaattaaaaagtcgatgaacaattatcgtagaaccgaagaatggaggcaacacgtcatgaacacagaataagtagcagaagcagcaaagcagcttggcatggaagaaggcatgcatgaggcaactgttgcagcaatccataaaacgattaacatgcttagaaggatgaagcgcagtcccaagcaaatcttgcaagaattagaacaagattatggcaatgaattttctgaagaagaactagcagactttgtgaaaaacgcctagtcgataagatataatgatagctgtgaagctatcattttttagataacgggggcttgatcatgaataatcctgaagaattacaacattttttagatgttctgctaaaagagagtaactttaccagagcagctaaagaattatatatttcccagccttatttaacgcagctaattggacgaattgagaaaaaattaggcactaaggtcatcaaccgagatgagagaccctatacgttaactcctgcaggtctaatttactatcaatatttggagaatgtttcatataataagcagcaattagggcgcaagctggaggcatatactcatcctgaccaacagataattaaaatcggcattttggagagcttaggtacatatttattgccagaaattttgccgcaatttttgcaagaaaaccccaacgtcaagattcagctatttgaaaatttccccagagaaaatgaaagaagactgcttaatggcgagctggattgttatattggtcagacgccagaagcacttgactcgagtttagatgtggttgcgggtggcgaggaacgctattacgtagtgatttcgccagcctcaccatattaccaagcaggaaagtttatcttaaattcggatgaacttgatctaaaagaggtactgcaagagcctttagtgttgagttcacctggttcagctatccggcatcaagttaatggcttatttcagagattaagactcgaaaaaaatattgtgatggagtctaatagtattattactgcaactaacttggcaattcacggcgtgggtattaccatttcttcggcaagtattatcagaagaatggaacaaacgccaattaacttgttgccactagatcgaaagttaatggatgttgtctttttcattgctagcaaaagcggggaaaagtcgccagcgttagaaaacctaatttcaatttttcaaaagacgcatttacaagcaaaaataggataaagaaaaaggcatcatgcgatgccttttaaattgctttgatttctattgttttcgtttcatgtcgatcatcttcggctcaatgtagaagtgatagaggaaggaataaccaagcagtacaaaggtaattccttcaatccaaccgccgaatacatcagatggatagtgcacgtggacgaaaattctggtgtaaccaatcatcagtgggaataaagcccaaataataatcaataaagtcttccagaatttgcttctcactaaaagaatggttaggataatcaaaacaccaaatagcgccgcgctaccaactgagtgccccgatggaaaactataaccatccgcataaactaagtgcttgaccgttggacgctgccgcattgctgcgtgtttgataatccaattatagccattagcacagatcatgacaccagcggtaaaccaagcgtatgcatattgcttaaagaccagtaaaactatgaaaacaatgattgtttcaattgtgatcacgcttgtattgccgagattagtaaaatctttagcaaaagcgacattagctggattattgttgcaaacaatgttgaccacagcattatcaaaattgtgaataaattgtgagccggatgaaaccagtgcggcccagacagcataaataaccacgaagcagataccaggtattaaggtgtccttaggtggtcgtttcgtattaatcaaaaaagtactcccctcttgaaatttatagcatttgtggtaaattataatcattatctataagaaaataaaggtcgagaagtagtaacaaggatatttttttcagagagagactggttggtgcgaagtcttagaataaaattgtgaactcgtctcttaataaaacctagcgttgccatccgcgttaaggagcaattaagtgtcacaattttgtgaaacttaggtggtaccgcgatgattcgtcctatgattttttcatagggcgttttttgatagtaaaggagagtttatcttgtataaccacaaagtagttgaaaagaaatggcaagattattggtcaaagcatgatacctttaagacaggtactgaccctgataagaagaattattatgcattggacatgttcccattcccatctggtaagggacttcacgtaggtcacccagaaggatatactgcaactgatatcgtttcaagaatgaagcgtgcacaaggctataatgtgcttcacccaatgggctgggatgcatttggtttaccaactgaacaatatgcattgaagactggtgaagatccagaagttgttactaagaacaacattgctaactttaagcgtcaattgaacaagttgggcttctcatatgattgggaccgtgaagtaaccacttcagatccaaattactacaagtggacgcaatgggtttttgaacaaatgtataaaaagggcttggcatatgaagctgaagttcctgttaactggtcaccagacttaggtactgttgtggctaatgaagaagttatcgatggtaaaactgaacgtggtggctacccagtatatcgtaagaatatgcgtcaatggatgcttaagatgactgcatatgccgatcgcttattagaagaccttgatgatttggattggccagaaccagttaaggaaatgcagcgtaactggattggtcgttctgaaggtgcgcaagttactttcaaggtaaaagacagcgacaagacttttgatgtctttactactcgtcctgatactttatttggtgttagctatacagttcttgcaccagaaagcaagcttgttcaagaaattaccacacctgaacaaaaagaagcagttgatgcttacattaagaaaattgaatctaagtctgatcttgaaagaactgatttgaacaaagataaaactggtgtcttcactggtgcctatgcaattaacccagttaatggcaaggaagtgccagtttggatttctgactacgttttagctagctacggcactggtgcagttatggctgttccagctcatgatgatcgtgactatgcttttgctactaagtttggtttgccagttaacccagttattgaaggtggcgatattgaaaaggaagccttcacaggtaatggcaagcacttcaattctgagttcttagacggcttggataatgaagaagctaaaaagcgcatgattgaatggcttgaagaccataactgtggtaagaagaaggttaactacaagttgcgtgactgggacttcagccgtcaacgttactggggtgaaccaattccagttattcactgggaagatggaaccacttcattagttccggaagatcaattaccacttcgcttgccacatgcaactgacattaagccatctggtaccccggaaagtccacttgctgacttgactgactgggtaaatgttgttgacgaaaacggtagaaaaggtaagcgtgaaaccaacacgatgcctaactgggctggttctagctggtactacttgcgttacgttgatccacataatgataaggaattagctgactacgatttgcttaaaaagtggcttccagttgatctttacatcggtggtgcggaacacgctgtgcgtcaccttctttatgcaagattctggcacaaggttctttacgatttgggtgttgtgccaactaaggaaccattccagaagctttacaaccaaggcttaatcttgaagaatcacgaaaagatgtctaagtctaagggtaatgtagttaaccctgatgaggtgatcgatgaatatggtgcagattcacttagaatgtacgaaatgttcatgggtccacttgatgcatcaattgactgggatgacaatggtcctgcttcaactaagaagttcttggaccgtgtgtggcgcctctttgtaaacgatcttgatttgaaggccattccacaagaaagaatcgttgataagaatgatggtgaacttgacaaggtttatgcagaaacagtcaagaaggtaactgaagactttgaatcattacactttaacactgcaattagtcaaatgatggtcttcatgaatgctgctcaaaaggctaagaccattccacgggaatacgcagaaggctttgttaagcttttagctccagtggctccacatatgatggaagaaatttggcaagtctttggtcatgatgaatcaattacttacgctaagtggccaacttatgatccagctaagttagttgagtcaactgtagaaattatggttcaagttaacggtaagcttcgtggtaagttccaagctcctaaagacgctgcaaaagatgacttgcaaaagcaagcaatggaaattgaacacgtaaagaagttcttggaaggcaaggacgttaagaaagttatcgttgtgccaaacaagattgtcaatattgttgctaaataagttagattttcctaaaaaataataagaatacttattatttagatttattgaattgattagttgagacttttattgggaaaattttaatggaagaaaataacttaaatagcaaagatacacaaaatacttttctaaaaggttccgcatggatgacctttggctcaattgcctcgagaattttgggtgctttgtatattattccgtggtatgcctggatgggctcctacggcaatattgccaatgctttgactgcgcgtagttataacatttatacaatttttatcttaatctcgacagccggaattccaggagcaattgctaagcaggtagctaagtataatgcactaaacgaatatgggattggccgcaaattatttcgcaaaggcttaattttaatgaccgttttgggtattgtctcagctgcgatcatgtattttgcttcgccgcttttagcttcaaatgggagtcaaagtgatccaagacaggttgcagttatgcgtagcttgtcttatgcgattttaattattccaattttgagtatcatgcgaggctatttccaaggttatgccgatatgatgccaagtgcgatgtcacagtttgttgaacagtttgcccgggtagtctggatgttgctaacggcgtttgtaattatgaaactgcaacatggttcatatgttcatgcagttattcagtcaaacttagcggctgcagttggtgctttatttggaattggcttattaatttggtttttgttttctagaagaaaacaactagattatttggttgcccattctaataatcgcttgcgggtctcaacgactgaattatttggtgaaattattgcacaagcaattcctttcattattattgattcaggaattaccttattttcattggttgaccaatataccttccacccgatgattgccagtctagttcatgctagttcagatacaattgaggactggtatgccttgtttggtttgaatgctaataagttaatcatgattattgtttcgctggccagtgcaatggcggtaaccgcgattccacttttatcagcggcgcatactaggggagactataagagcatttcaaagcagattgctaatacgatggacctatttttatttgtaatgattccagctgcttttgggatggcagccatcagtaggccaatttatacagttttctatggtccagatctattggggagcaacgtactatatctgtcgtcatttaccgcgattagtttaggattatttacggtgctgatggcgattttgcaaggtctttcgggaaatggactggctatcaagtacctggttttaggattgattttaaaagggatcctgcaatatccaatgattttcctatttaaggtatacggtccgctggttgctactaatttaggtttattaattattgtggcactttctttaaaacatttggaagtgcagtatgattttaatttgaatcgaactagtagaaggctggctggagttacagcattttcagttggcatgttccttgtggttaaattatgtgaaatgggactaggcaagtttctcaatcctgatcatagatttaatgcattggtgctagtgattgtagctgtaggtgctggggttgtcttttatggcttggtgacattgaagacagggttagtccaaagcgtcttaggtagtaaggtagaaagtattttagttagactacatatggataaataaaagaaaattgcggctctttgtcaaatcttactgataaggtgtcaagtctaatttttcctggtagttgagtaaatttttggccgggggatggcttacttgagtaagtttttgtgcaatttctaagtgaatcaaccctaattgtcaaaaaactgccactccctcttgcaaagacgataattagtgttattatataatgcataagaaacgcaagaaatgtgtataaaaacaattatttttagcaaaggaggcaaaaagcatgattaatctgactgttaatacaatcaggcttagcggtgtcgctgcaagagcaaaccgcgtcatgttttaactgtcctttagacaaagtgaatcaaagataatttaacagcacagtattaagtacacccggtttatcggcggcatcgttaactgaagattttttgttatgcgtgttagctaatgaggtattaagatgaacaagggtaagactttaatgactggtgctgttatttttatgtgcgggagcatgctggcggcctgcggcaagagccaaggagcatctgtcaagcagaatttaaactggatgaccagtgcgaaaatcatcaccatggacccatccaaagccaccgacaccacgtccttccagcagattgaaaatacgactgaagggctctaccagctgggcaaagacagcaagccggttaaggtactggtcaagaagacgactgtcagcaaagacggtctgacctggacttttgaccttaagaaggggactaaatggtctaatggcgaaaccgtaactgccaaggactttgtctattcctggaagcggacggtgaaccccaagacagctagccaatacagctacattttctctgggattaaaaatgccgaccagatcgttgctggtaaaaagaaggccgatacgctgggcgtgaaagccgctggcaaatacaagctgcaggttagtctggaacataagattccatacttcaagcttttgatggccttctcagtctttttcccagaaaaccagaccgcagttgaaaagtatggctcaaagtacggtacgtcatcaaaaacgaccgtttataacgggccattcttgcaaaagggctggacgggctccaacttgtcctggaccatgttcaagaacaagaactactggaacgccaaagccgttaagctgcaaagcatccactttgccgtggaaaaatctccgtcaacggcctactacctctaccaagatggcaagctggacacggcaagcctgagctcacaagcctccaagaacctgcaaaagtcaccagactatgttgtaagaaagaccaacgggacgacttacttccaatttaacctgaaaatgaagaagttccagagcaccaagatgcgtcaagccatctccatggccctagacagaaacgtcttagccaagaccttgggcggcggctacacgggctctaagaactttacggcagctggcatgaccaaggtgggtgacaaggattttaccgacctctctcaaaccaaggaaagcttgctagtaacgggccaccacaagcagctggcccaaagctactttaaggaaaggttgaaggaacttggcttaaagaagctgtcctttacggtgattacggcacacgtccaagtccatcggcgaatacttccagagtgctcttgaatcaacttttggcaagcaaatcgacgtcaaggtgcaaagcctgccaaccaagtcccaatttgccaagatggactctggtaactttgaagccacgatcagcggctggaatgcggactttgccgaccaaatttccttcctggactgcatgacctctactaatggctacaactcaggcaagtggatgaagctgctggcaaaggctgaaaacaccttgctggttgatcagcggctcttactacttcgaacacgtctacattgccaagtaagccagtaaaaaatgtattatcatgctaggtattatgtagtagaaagtgaagaataaagcgtaaattgctataattaagatagaaataagggaaaatcttaattagtgaaggagcgaaagataatgaaagactcaaattcaccaatttacaacatttggatggtggttctgctggttgccgcatatgtctggccaatctttggcttagcaccagccatctacctctttatcaagcgcaaggatgagaatctggtccctttgaagaattggattactctagccttgatctggcagattgttttgtggctgctcttgattttggttgtcgtctccttctgggtcggcgcctttgcggtcaaccacggttaactaaataactaattgaatagctagataaaagtcagtggatgccactggctttttgtctgcttaagcaaatgtcataactatatcactatttatagccttgaatagatttaatcggttacataatgcatcacgcaggtgatatctcacaaaaaattaacaaaagcatcaggttcaaagattgttaagccgatgttaaatagaactagcaagggtgaaagcggtacatttttttctttgttaagctaatgtaaactaagaaaaataacgttagaatattaaccgattttcgaaaaatggtaaagatttttccaaaatccggccagaatttaaacaaagttaagtattttactttgatttaacatttccccctgaatgtatttaacctccattaattactatttacttagtaagaattcaaggaggataattatgttaggcaagaaaactagagtagtggttatcgcacttgctctactggctatagtcgtcggctgcgttgttggcagttcaaaggcagacaccaagggtgtctctgggactgttaacgctgcggggtcttcagccctgttgccgctagtccaaagcgcagctaaatcattcatggatgaaaatccagacagcgtgatcaacaccaacggtggtgggtcaggccaaggtttacaacaagtctcagatggaaccatcgacatcggtgactctgacttgttcgcagaagaaaaattagacaagaagtccgcatccaagctggttgaccaccaagtggccatcaccgcgattgccccaatcgtcaacaaggacgccggggttaagagcttaaccacccagcaattgatcgatgtttacactggcaaggttaccaactggaaccaagttggcggcaatgactgcaagattgttttgatctcacgtcctgcttcttcaggtacccgggcaacttttgaacaatatgctttaaacaagactgccagtcgttcaaaccaatcactggaaactgacgactccggtactttgatccaaatgattcaaagcgttgaaggggctgtcggctacgttgccttatcatacttgactggtaacccagacgtaactgcagttgccatcaacggcgttaagccaactctggacaacgtttacaacggctcatacaaggtttggaactacgagcacatgtacaccaagggtcaaccaaagaaggctgctgttaaggcctttttaaagaagatgttaagtaaagaatacgaatcaaaggttgaaggcatgggctacggtgttgcttctaagctttcagacaaggctaagaaagaacacaagtaaaaggagagtgatttttcatggacaaggtagttcaaaaagccatcgctagcgataagcgctggcgggcagtatacattgcttgcgggctcttgattgttgctttgacgctcttgatgggggcattcctgctctaccaaggtagtcaaacctttatcaaggctcaccacagcatctgggaattcctgtttaccagcgactgggcaccgcttgacaagaccggcctgtttggcgggaaagtcggtgcagcagtttacatcgtaggttctcttgaaacctgtttgctggccctggttatctgcttgccatttgctatcggctcagcagtttacatgacggaaatctcaccaaagatcggtgaaaagtacttccgtccagctacggaaatctacgtttcaattccatccgttgtttatggttggtttgggatgaccaagctggttccattgattaaaaatattttccatccagccatgggtgggtactcagttttggccgcatccattgttttggccatcatgatcttcccaaccatcaccgcggtttccgctgacgccattaagtcagtgccaatgagctaccgtgaaggtgcttacggtttaggcgcaacccgctggcaagtaatcggcaaagttgttttgccagcagcttcaggcggcatcttgaccggggtgatccttggcttggccagagcgatcggtgaagccttagccgtagccatggttatcggtaagactcgctcatttgcggcaaaccttttgtcaccaaccagcaacttgacgagtgccatcgcagccgacatgggtaacactgcccaaggcggggaatacaacctggctctgtggaccatggcgctgctcttgttcatcatctcaattgtcttgattgtgctcattcacaaactggctaacggaaagaaggataaataatgaaccgtgctaagaaaaaagatcggtttatgaccggcgtcttttacgccatcggctggctgatgctagcattcttgctgtatttgacatttaccattatctttgatggcttgaagggctttagcccagacttcttaggggctgccggcaacgggatcttcaaccaattctttaacactctttacttagttttcctttcgctcttagtttccgtgccaatcgggatcggggctggggtttacctggctgaatacgccaaggaaggcaagctcttgaccatgctggaagtaagtatcgaatcactttcttctctgccatccatcgtaatcggtttgttcggctacctggccttcatcatgtggacgggaatgagctggaacatcgtggccggggccttgacgatctcaattttgtcaattcctttgatcactactgaaaccaacaatgcaattcgtgccttgccaattgaatacaaggaaggttctctaggtttaggtgcaaccaagtcagaaaccattagaaaagtcttgattccagctgctatgccgcaaatcttgactggggtcatcatggccgctgggcgtgggtttggtgaagccgccgctttgctgtacacgtctggtcaatccacttacatcaactggcacaacttctggaagattacttcacctacttcacctttgaatccattcagaagtggtgaaactctttcactgcacatctgggtcatgagaactgaaggggctttgaaccctaaggcaacccaaattgccaactttacttcagctgttttagtagtactcgcactgctctttactttagttacctgccgcatttcagacaagatgcgtaagcgcaataacggaggaaattaataatggaagacaaaattactatcgaaaacttgaacctttactacagtgatttccacgccttgcatgaccttaacatgcacattccaaagaatgaaatcacggctttcatcgggccatctggttgtggtaagtctactttgcttcgctgcttgaaccggatgaacgacctggttgaaggctgccggattgacggttcagttaagttagatggtaccgacatttatggcaatgaccttgacgtcactgttttgagacagagagtcggcatggtcttccaaagaccaaatccattcccaatgagcgtttacgacaacgttgcttacggtcccaagatccacggcgtaaccgacaagcaagaacttgacgaaatcgttgaaacctcattaaagcaagctgctatctgggatgacttgaaggaccgtttgaacaagtctgctttgggtctgtctggtggtcagcaacaacgtctttgcatcgctcgtgccttggctgttaagccagaagtcttgctgatggacgaaccaaccagtgcccttgacccaatttcaacttcaaagattgaagaattggctctgcaactgaagaaggactacaccatcgttatcgttacccacaacatgcaacaagccgtgagaatttctgacaagactggcttcttcttgctgggtgacctggtagaattcggtgaaactgaccaactcttctccatgcctaaggatgaaagaactgaaagatacattactggtcgtttcggttaaagaccagtaataattagatagagtaagaaaggcagaaacaatgactagatcaagatttgatgaagaattggacaacttgcaaaagtccatggaagacatcggcaagctgtgccaggaagccattttggaagcaaccaacaccttgtttacgggcgactaccatgaagctgaagactcagtcaacttgcaccgccgcatccacaagagcgaacggaaaattgaagacagctgcttgcgcctgttgatggagcagcagccagttgcgactgacttgcgggtgatcagttcttctttgaaggccgtttacgacctggaaagaattggggaaatctctgctgatattgcagaactcgtgttaaatgaacacctgtccatcgccaatgaccagctgaaccttaagtccatggtgcaaacctcaaccagcatggttgatgatgccgtaaccgccttgtccaccaagaatctggaactggcgcaagcggttatcgaccgcgacgacattgttgacgatgactttgaccatgcccgagaaatcctgatcaacaacttcagcaaggatggcaatccagaatacctgatcaacctgatgatggttgccaagtacttggaaaagatcggtgaccacgcggtcaacgttgctaagtggaccaagtttgtggcaactggcaaggccggaagataagtcttggaaagtttgctaaattaatattcttcctgatctatctgcatagcaaatgtttctaagctataattagagtagctatttgcagatagattagggagaatttttttatgactgaaatatggtgtgtggaagacgacgaaagcattcgcaaaatcgaaatgtatacgctggagtcgatgaactttaaggtgcgtggctttgaagacgggacgacttttgtcaaggccctggcggaaaagcatccagatctggtcatcttggacctgatgctgccagatgaagatgggagcgatattttgaaaaagctccgtggcaactcgtcaactgaagaattgccggtgatcatcgctagtgctaagacagccgaatatgacaaggtgaagaacctggattctggggctgacgattacttgaccaagccttttggcatgatggaaatggtctcccgggtcaaggcggtcctgcgccggaccaaccacaagaaagaagacaagatcgagaaagacgggatcaagatcctgctcaagcggcatgaggtttatgtcgatggtcaggaaatcgagctgaccttgaaagagtacggcctcttgaagctcttgatcacccatccagggaccgttttttcccgagaagaaattatggatcaaatttgggaaacgggcttttacggtgaaacgcgcacggtggacgttcacgtaagaaccttgagacaaacattgagtgaggctggtagccatatcgaaacggtgcgcggggtcggttatcgctaccatgaagggaattaatgtttaaaaaaatatttcgggcagtctttttatcaacggcagtcatgctggtctgctcggtggttttgagtgcgctttttttaggcatcgactatgatcacaatgaggtcaacaccttggcttcgcaggccgatttggcagccagcggggtcaacaatgggggaaggaagtacttaacccagctaaaaggagaaaattaccagattacctggatcgatgctaaaggcaaggtactctacgacaacgaggaaaacccagccaagatgggcaaccacgctaagcgcaaagaagttgctgaagccatgaaaaagggcgaagggcaaagcgagcgctacagcacgaccctgtcgacggttacgatgtactatgccaaaaagctgaaagacggcggcgttattcgggtggcggttacgcggaattcgatctggatgaccatcttgcaattgctgacgctgatgctgatcatcttgctgatcgccgtgattgcttcttggttcgtagctaagatgatctcgcagtccatcgtcaagccgctgaaccagttagacctggaccagccgcttgaaagcaagagctatgaagaaatcaagccgctgttaacccggcttgacagtcaaaacaagcagattgctgaccaaatggagcagctccaccaccgggagaaggagttcaagacggtcaccgatgccatgcaagaaggcctgatcttgatagacctgaacgaccaggtcctcttgtccaatccggcggtagtatcgctcttaggatcaaagtcttctgaagttttgccagatgatgttaaaaagatcatcgatcaagacaagcggaccgtctacaccgaagggatcgtggaaagagaagggcgcaacattcaaattagtgccagtccgattttttcacggaaggtcttaaaagggacttcgatcttggtcgttgacgtcacagaagaataccatgaagagcaggtccggcgcgaattcacggccaatgtgtcccatgaattgaagacgccgctgcagtccatcatggggtcagcggagcttttggaaaacaacctggtcaaggaagacgatcggccagccttttaccggaagatccatgaatcttcagctcagctcttgaccttgatcgatgacattatccggctgtctcacctggacgaaaatccggaatttgaagaggtccggatgaacctgaagagtccggtgaccgaggcgatcgaagccttgcaggcgtcagctgacaagcacgagattgagctgaaggcggctttggccgatacagaaatcaaggccaacttccgcttggtttatgaaattgcctacaacctgatcgacaacgccattcgctacaacaatcctggcggccaggtcaaaattgcggtcaaggaagtgcgggggcaagctattttgcgggtttctgacacggggatcgggattccgcttgaagcgcaaaaccgcatctttgaacggttctaccgagtcgacaagtcccacaaccgcaagactggcgggacgggacttggtctgtccatcgtcaagcacgcagtacagcagtgccatgggacgatccgccttgaaagtgaactgggcaagggctcaacctttaccgtggtcttcccagctttaaagcatgaagacaaattatacagccaaaattgcttatttgatctatgataaaggtgtcgaaagaaaataagagctctatttaaataacatagacataatcatgggctaagtgtatataaagtgtaatttagaactatacaatatatacgtaaaatcttatgattaaaggtgaacagatattatagccactttttttaggattcgattaatgtaaaaattacacaatgaattaataaaaagcgccatataataagcaaaaaaagtcatttaaataactaaaataaactgagacctaaaagttgagactgtaaaatagtttgtgtaaggatgaatgattccttaaatttatttctttaaacattagaaaaaggagttcctttctcgtatgattggtttgaacaaaaaaaacacatacagaaagaagaactccttcatgaatgattttaccaaagattttgctcaagctctattcaatccagacaaaataaatgatttattgcgcaaagaactacaacaggctgttaataacttgctagaagctgaattgactgcctttctgggctatgatccctatgccagaaatggctggaatactggcaactctagaaatggtgcttatttccgcaaagttgatacgcaatttggcccaattgaagtgcaagtgcctcgggatcgcaacggtcaatttcatcagcacacgctgcctgactacaagcagcactcggatatcttggaaagcatgattatcaagctttactccaagggcgtgaccaccagggaaatagccgatctaattgaaaagatgtatggcagccattacagtccagctcaggtatcaaatatttccaagcagatgattccaaaggttgaggcttaccacaaacgcaagctaagcgacaagtttttctgcgtctatttggatgcgacataccttcctttgcgccgagaaacgtttgagcgtgaagcagtctatattgccattggcattaaacctaatggacataaggaagtcattgactactgcattgctcctagtgagaacattgaagtctggacagagatgcttcaaaacatgaagtccagaggcttgaagcaagttgaactctttctttctgatggtgttgttggcatgaaaacagccttggccaggacttatcctaaagctcattttcaacgctgtttggttcatgtcatgcgcaatatctgcgctaaagtacgcgtcgacgatcgtgaaaagatcatgaacgaattcaaacaggtgcatcaacagacaaacaaagaagaagccacagctgtcctgcatgacttctataccaaatggggcaaggtttacagccatgttatcagaagcttgaaagacatagaaccagatctgctggtcttttataactatcccaagcagatcagagcttcaatttattcgactaacatgattgaatcatttaacaatgtgatcaagcgcaaagctaagcctaaggcagagtttccaactgaacagtcgcttgatgcatttattggcatccaggcaatgagctacaatgaccgttatttcaatcgaattcataaaggctttggtcaggttcaggacaccttagaatcctactttgattaaataaataattaaaaaatcaatttacgagaaagaactatttacacaaaagatttgacagtttctaaaagttagacacttttaggtctttttctacgtaaagtcaagcataataagaagtttggcttcattttttgtttaaatttcaacttaaacatcttttagtgtcgatttatttttttagttagacacgacaaataagcccagatccatatctgatttttgggcttagcgttataatgtacttgatcaattaattacgactaaagtctttttgattatgtgtggctacgttgtaatcatatggttgatcattgataatcagggcataaatggttctgattagtttatgaattgaagcaatagctatctttttgaaccctttggtttgagaggatagctttttgctttcataataatctgctatatgacacggatttgtcttagctgcattatcaatttgtccaatagctcgataaagcaacttacgtgcgactgcattgccatgtttagtaatacttaaattagagtccatttctcctgactgatatctgcctggatcaattccgataaaagcattgattttattaggattactaaatctgcgtaaatctcctaactctgctaaaactctgacagcagtggtctgtgcaaagcctggaatgctttctaggttttctaaatcatgattaggcaaagacttcgctaacttaaccattcttgcgattaaattttctctttgatcacttaaattaagcaatctgtgtgcataatactgcacttgctcgacttctatgctagagcaagatacaactggataagcttgataagctaattcaattaatttatctgcagtccttagagcgtgtttaaaagcaatcccctttaagctcattaaccagttaataagctgttttttatcttctcttcttactaagtcacaatgaggatatcgcacaactatttgccagtaatttttacctttagcagaagaaaataaattttcaatttcaggaaaagtcgattgtagagcttggtgaagtcgatttttagctattaccaagtcacttgtcagctggtcatagaagcggctcaaagcattaagctgcttataagtttgggattcgctttgattaaccggatggcgataaagtctttgaattaaagctaaatgataagcatcagttttatcggtcttgttgtagcgtagccccatattcatctcttttttggctttaagcggattaataacaacatattcatagccgtagtcttcaagaaaagcctgcagtctgcgtgaataaacaccggtagcttcaaaaataatttgcggatgtttagaaaaagcggttaattcatgaagcaattgaataaaaccaggacgattattagtaatggttagttcatttttgctttcaccaattagttcacaaacagtagaagtagacttgcttacatcaattccaaaagtaacttgcataataaaaacctccaaaacttagtagtaaaacgtatttacttaagaaatcagatctaattttctaaactcgacatctagtgtccacattcttcgaagagactattgaaaacttaagtaaaactgccagtttattatgcgacatcaagtgtctaaagacctcagggcatatcgttttaccactactttaattctacaaaagaataaaaatagtgaatcaattatcccgtcggataactaattcactatttagcttagaatgtttactatgtctaaatttaataaagaacaaaaaatagaaatttatcataaatggaaagatgaaaatatctcaatcagtcaattggctaaagcgtacagaatgaatctagctaatttagactatatgcttagattaattgatatgcatggaatagaaattttaactactaaaaaccaaagctattccaaagagtttaagcagcgaactattgaacaagcaatctttggcaataaaccatacttacagctgtctttggaactggggtttaaaagtattggcatgcttaacaattggattagagaatataagaaaaacgggtataatgtcattatcaaacagaaaggacgccctgcccgtgaccaaagaaaagcagaaatctcgcaagaaactggagaaagagatccagcagctgaaagaagaaaacttgcgattgcgtattgtgaacgaatacgtaaaaaaactaagtgccttggaccaagaagatcagaagaaatagctagggtgattacggatctaaggcaagaattcaaagttagtttaaattatgtattagctgcgattgcagagcaccctgagctacctataattgccagaagctcatactacaagattatcaaacgacagcccgtcaagcctaaacggtcaaagcttattgctagaatccatgagatttttaatcatcatcaaggccgctatggatatcgcagagtagctttgcagttaatcagagagggctggaaagttacggagaaaaccgttcgctattggatgcataaattaggtcttaaaggcatcaggcgcaataagcgcaaatattcaagctataaaggtactattggcaaaatagctccaaatttaattcatcgtgatttcttcgcagccctgcctaacacaaaatggtatactgatatcactgaatttcatcttaataatgaaaagctttacttatcgcctattctagacggctgcggtggcgatatagtttcttatactatctccaaacatccagatatggatttagtaatgacaatgcttgacaaggcttttgccaaagaaacagctcttaataactgcatttttcatactgatcagggctgtcagtatcaaagccctcgttatcagcgagctttaaaactccatggtattactcaaagcatgtccagaaagggcaactccatggatgatgggctaatggagaacttctttggcctgctcaaaactgaaatgttctatgatcaagaatacaagtatcataatcttcaagaattaactcaagcaatcgaggaatatatcgaatactataacaacgaaaggataaagagcagattaaaaggcttaaccccgaaagagtatcgaagtcaagcctctattaatccaatattttaattgtctactttttacgtctcagtacaaaaattatagagccggttttttagtactgttttaattctatcatgattgtagtaatgaatgtattccttgattgcttgttctaattcacccatggttttgaatgtcttttcaaagccatagaacatttttcgtttaagaatgccaaagaagccctccattaagccatcatctaatgaatttcctttacgtgacatagactgggaaacaccatgatttttaagccaagcttggaaaacagcgtgctgatattgccagccctgatcagtatgaaaaattaacccattgagtgcaggatgcttttgataagcttgatccagcatgtccattacttgttttagtaccggatgacgatttaatgtataagcaacaatctcttgcgtacatccatccataataggcgacagataaagcttctctccattaaggtgaaattcagtaatatctgagtaccaatgtctatcaggaataattgctttaaaatttcgtttaattaaattgggcttgatttttccaacagtccctttgtagcttgaatatttaaatctgcgtctaattgcaatggcatatagatgcatcttggtcattaatcgtttaacacgtttatgattaactataatgccttcacgtcgcaattgggcagtaattctacgatagccatatctatgcttgtgctcctcaaatatttctttgatccgttccataatcttttcgttttttaaatctttatcatctttagttaaagtgtagtaataattactgcgtgataaatgcggaagatcaggattggagttaatcgtatcaagcacaaacttaacggttacgtggagttcttgccttagttgcgtaaccgcagaaactatctcttgtgctgttggttttcggttcttggggagactaaggcgctcaatttttttacaaattcgttctcgacagtaagtcttaagttcttctgtttgaggtcttttatttgcttctgaagctcttgaatctgtttgtctttgtccttcatgggtaggtctgcctttcttgtgattaatgacattatacccgtcttctttatatttgcgaatccaattgtgaagcataccttggctgggcagtcctaaatccaatgatacctgacgagccgtttcatgatcataaataactcttttgatggctttctctttaaattcaactgagtaatctttatagctattatcaagaatttctatcccatgacgttctattaaggcaatcagataaaacaaatttgtacgatttaccccatattccttagcagctaggttagctgatatattataatttttccaattattgtaaatatcaattttgtcttgtttggataatttagtcataataaaaacctcgaaattcttgtccgaatttcggggttcatatcatttgtttctgtagtgccttttttataaatatcaataaattttaggagtgtaataagattttagaattaattatgttcaactgctgttaacgtaatgactccaattaattcaagtgccaaaaatgtaattccaaggatagtaatcatagtgcccatctccttatctaggagataaataattagaatatttatcttttaattcaatcattgcttacactgttactgtaccacataattgcgtattatgaaagcgattacattaaattgggagaaaaaagttgacctccgaagaaatcaacttgtgcccctgccaaggacctatattatagcattcatttattctgcatgatcatcctttttctcagttgagtcaggattttgatcgtcagacttggtgaagtcaccattcatggtattaggacgaccagtttgataatcaactgtgtgcttttcagccttaggtgcgctttgaccaggttcaggcataaccatagcagcaataatatataaggcaacgccaggaaatacacctgtgaataatatcaatgcagcaccgatgattctaacccaagcaggatctagatcaaagtagttagcaataccgcccaaaacgccagctaaaattttattttgtgattttgtaagtcttttttgcatgataatcaactcgtttctaactgttctatctcttttacatatattatacagcaaaggcatgaaaaaagtgttgattgctcaacacttacacataattatgatgcccgctaaaagattcgaactttcactcagtcacctgaacagcgacctgaacgctgcgcgtctgccaattccgccaagcgggcaattttctttggtacatgaataatcataccaaatatttggtaaaatgtaagcataaaatactttaattataaaaaaggatggaaattcatgttttttagcaaaaaaataaaacgtgcagcaattaccacgattgctgcagtatcaattttttcttgtggtgcggtatttgcaactataccagttagcgcagatacaactagtagctatcaagctgatcaagttaaactaaatgtaaagtcagcaattgcaattgatagtgattcaggtcaaattttgtatgccaaaaatgcgactaaaactttgccaattgcttcgatgactaaattagtaacagtttatttaactctgcaagcaataaaaaatcataagctttcatgggatcagaaagtaaagccaacggctccgatagtaaaggtagctaataatgcagaatattcgaatgtaccattaaaactaggacattcgtatacgataagacaactttatcaagcaaccttaattgaatcagctaatggtgctgctatgctgcttggtcaaacaattgctggctcacaaaaggcatttatcgatcaaatgcgagctcaagtaaaaaagtgggggattgaagatgccaagatttatactgcttgtggtttacctaatggcaatttaggtaaagatgcatatcctggtgtaaataaaaatgctgaaaatacgatgtcagctaaggatatggctattgtcggtcaaaaattaatctcggcattcccagaagtattagaaactacacgcttagctcacttaaactttaaagatgctggtcacgtaactaagatggctaactttaactggatgttaaaggggctttctcaatatgatcaagcttatccagttgatggcttaaagacggggactactgatgctgcaggggcttgttttatcggaactgtacaacacaatggtgctcgtttactgactgtagtaatgggcgcacgtcaccgtgacggaacggatccagctagatttgaacaaactaaaaagttaatgaattatgtttttaccaagtatcgtcctgtaacaatgactgctggtagccaaatgaatggcgctaagacaattaaagttgttgatggtgataatgcaactactaatttaggacttaagcaaaagactactatctgggatccagctgatggcaaaactttagtggcatcattgaataaaaaatctgtagaagcaccaattaagaaagatcaaacagttggtgattatcaatttaaatctggtaatgaaaagattgtttcattgtctaatcctaatgggatgaacgtcaaggctaaggcattgtcagctaataacaaggtgaacttttttgtcagaatttggcgctggattttcggaggaagataaatatgactgaaatttctgaagatatcttgaaaaaggtaattaaagaaagagaaagcgatacacataaaggcgattacggtcgtgtactcttgatcggtggtagtgagaactatggtggcgctattattatgtctaccgaaggcgctattaatgctggcacaggtttgactgctgttgcaacacaccctttgaatttagcaccgttacatgcacgagtgcctgaagcaatgtttatcaactggcgcgatgctaagttagcagatttaatcaaaaatatggatgttgtagtttgcgggccaggattaggcatgagtgatctcgctaagcaaattttagttatcttgcgaagatgtacttcagaaaaacaaaccgttgtcttagatgccagtgctcttgatttaattagtcaggataagaacttattgccaactaatgctggccacttaatcttgacgccgcatcaaatggaatggcaacgattgagtcaaattcgtattccgtttcaaacagatagtgccagtattgatgctttaaaccaattgattccagatactaatgcgcttttagtactcaaatcgaatcatactcatgtttataatgggactggtcaaatttttgttaatccaattggcaatccaggcatggccactggtggaatgggtgatactttagcaggaatcatcggtgggatggttgctcaatttggcccaggcgttgaaaccgttcaagctgctgtctatcttcattctttagcaggtgacttgcttgccaaagataattatgtggtacgaccaacggaactttctaaagtattgcctaaattgatgaaaaagtattcagaattggcataaacatgttaaaattctaatagtaaataaatgcatccctagttgagggatgttttttaacgcttcaaagacgaaaaagcataatataattgagttaaatattaataaaaaagaagattaacatatttatgaaaaaaaacattattatcggcgtaactagtatcgttctagcttttggtgcaattatcggcttagctaaggtatgcgcacctaagtctgatgtctcacaagaagctgctacaacgcagactaaggccaaaactaagaaaataaataaaactaagaaaaaacaaactaaaaaagtagataatggtgctttatatcgaccatatagcgatcctaaggacttgcgcaaggcaggcacttggaagaaaaagagtgagcctaaaaaatatcctaagattaagccatatgaaaaggatttgactttgcgggtatcattaaaaggaaaccggacctatttgttaagaaaaggcaaggttttgtataccatgttatcaactggtggaatctacaagaagggcaagtcattgaccccaactggaacttttaggatccaaaatggtcgtggagacagctttttcaattataacttaggtgaaggagctaataattggactagttggagtcctgataacgtgtacttgttccactctgtgccaactaaagctgattatagctataacttaaaagaagcagtcaaattgggaagaactcaaggttcacatggttgtatccgtttgagtgtacctgattctaagtggattatggatcacatcccagatggtacgaaggtaatcattaaaaataattaacaagaacgttgctttttaagcaacgttttttaaaaaattgcagtaaaaaactttgttcaaagcgttcaagattttaatccaactcaagaatggtttttttaaccaaattagtggcagaagccgttttttcctgctataatcatgtttgccaagaagtcaaaagtagtagttattttctttttaagcgagtctatgttggtgcaagatagatactagaagataatgaaggcgtgtttgactgataaaatcaagaatttaaataagcggatactttgtatcaatctgagtggtaccgcgggtttttaactcgtctctttctacatttgtagaaggagacttttttatttagaagagaggaataagatggactttaagaatgaagtagttgacttggttgctagtcaagttgatttacctaaagaaaaaattgctgcattaattgaacgccctaaaaatgctaagatgggagactatgctttcccagcatttattttggctaagactttgcacaaaaatcctgcagaaattgctaaaaatattgcggataacttatcaagtgataatttcgctaatatccaagcagtcggtccttacgttaactttgcgattgaccatgaaaaattagtttcatcgactttgaaggatgttttgactgaaaaagaacattacggtgatcaaaagattggtgaaggaaatgtgccaattgatatgtctagtcctaacattgctaagccaatgtcaatgggccaccttcgttcaactgtaattggtaattcaattgctaagacaatggagaaggttggctatactcctgttaaaatcaattacttaggtgactatggtactcaatttggtaagttgattgctgcctacaagcactggggtaatgaagaagacgttaaaaaagatccgattatgaatcttttccactactatgtaaagttccaccaagaagctgagaaaaatcccgaacttgataatgaaggtcgtgaatggttcaagaaacttgaagacggggatccagaagcagttaaactatggaaatggttccgtgaggtttcattaaaagacttcaagcgaatttataaagaactaggcgtaacttttgattcatacaatggtgaagctttctttaacgataagatgcaaccagtaattgatgaattaaaagaaaaaggtcttcttcatgaatcacgtggtgcgcaagttgttgacatgggtgaaggtgaaaatcctgctattatcgttaaatctgatggtacttcaatttacttaactcgtgacctcgccgctgctgaatggagaatgaaagaatataacttcgttaagatgctttatgttgtaggtaacgagcaagcccaacactttgttgaattgaagactgttttgaaaaagatgggttatgactgggctgatgaaattcaccacgtaccatttggtttaatcacccaaggtggtaaaaagttatctactagaaaaggtaacgttgtcttcctcgatcaagtattaaaggatgctgtttcacttgctaaaaaacaaattcaagaaaagaatccagatttagcagatcaagatcaagttgctcatgatgttggtgttggtgccgttgtcttccacgatttgaagaatgatcgtttagacaattttgactttgacctagaagaagttgtgcgttttgaaggcgatactggtccttatgttcaatacactaatgctcgggcacaaagcgtcttacgtaaggctgctgcgatgggtgaaaatcctagcgaaactgatctagctcttgatgatgactgggcttttgccgtagccaaagatttagcagatttcccaagaattgtagctagaagtgccgaaaagtttgaaccttcagtaatagctaagtttgccttagatttagctaaaaaattcaataagtactatgctaatgtgaagattttaaccaaggacgataaaattggtgctcgtctcgccttagttcaagcaacatcaatcgttttaacggaatcacttagattgttaggtgtcaatgctcctaaagaaatgtaagagaaaaacaatgaaaataagaaaataacgcttacattctgtgaaaaattgttcatatttcaattattagggtacaataggcatgtaagatatttaggaggtattttttaatggcttattttgacaacggtaatcaaatctttaaagatgctcgtaagaaccattacgctgtaggtgcttacaacactaacaacttggaatggactcgtgcagaattacgtgctgctgaagaaactagaactccattgttgatccaagtatcaactggtgctgctaagtacatgggtggttacaagttcgttaaggacatggtagctgaccaaatggattcaatgaacatctcagttccagttatcttaaacttggaccacggtgactttgaatcagctaaggaatgtatcgctcttggttactcatcagttatgtttgatggtcacaagcttgatactgaagaaaacttagctaagactaaggaaatcatcaagttggctcacgaacgtggtatttcagttgaagctgaaattggtaagatcggtgaaaaccaaggtgctgatggtggtgaattagcatcagttgaagacgctaagagattcgttgctgctggtgttgacaagcttgcttgtggtattggtaacatccacggtgtttacccagaaggctggaagggcttgaactttgaccgtcttaaggaaattgctgaagcagttccaaatgaaccacttgtacttcacggtggttcaggtattcctgaagaccaagttaagaaggctatccaacttggtattgctaaggttaacattaacactgaattccaattggcattccaaaaggctactcgtgaatacatcgaagctggcaaggacttagacaagggtaacaagggttacgacccacgtaagttattgcttccaggtactgaagctattaccgatgctatgaaggaaatgatcggttggttaggtactaagactatcgatgacgaacttaaggatgcttcattcgaccgttcatcattaaacgaagaataatcatttgataattatttaaataaagtctagcgtttgctaggctttatttttttaggcaaatttggtgataacttaattgaacttattataaaagaaatataaaacctgaattgtcaaattaagtgcaacagttaggctatgaggaaatatattgcttgaagagttcttctgctgtgtgatattgaaggattcgacgatgtttgcggttaatggcatcagttgcctgttgaacataagcagctgacttatctttcatgcttttgcctttagggaagaattgacgcagaagtccattgcagttctcattggtgcctctttcccatggagaatatgggtgggcgaagtagatctggcagcctttgatcttggtcatatccgcaaactcagagccattgtcaaacgtgatcgatttaaaccaggcaggatgtctgtcaatctcattttgaagcagcctttggcatgtgcttgcccgatagtcaggaatcttgataactacttcaaagcgtgtggttctttcggtcaaagtcattaaagcaggctgattcttgcgtctgacgcctttaaccagatctccttcccagtgcagcggcgtttttctgtcttcaatctctttaggacgctgttcaatggaattgccaagatgcttcttgtgcaaagcatgaccgctatggccgtgatgacgcttgttcctgcgtcttttgagcttcataggcagatcaatattgcttatgtccagcaagccctgatcaatatagcgatagacagttggtgtgctgggacaagggtagcctggcatagtccttttgaattcaccaacgaattcatcgatgctggtggcatcaaatttagctttaaagcgtctggagagcattctcaaaaagacagcataatgcttcaatggattgcgctgatagcagtttttgcgacgcttctcataataaatctgtgcagtatcagcgtaatagtgctcatacaataaatagctgctgtctctttgcaggacacttccgcgtttgatttcgcgactgattgtcgacttatggcagccgacttcttgagcgataacagtacgggaagttatgccggaatccagcattgcttgaatttgtccacgttgtacgctggttaattgatgatagtgcttagaaatgctagaatttgaattggtcataaagatcttcctttcttgatttttcgtcacttcaagtttaggtcttcatggcctttttgtttaacacttagtgttgcacttcaattttaaatccgggaaagaaatataaaataaaaaattgaattataaagaaagtataaaaagagacttttatggaagcaaaaatgttaaatccatttatgcctaactttggtcgttttcctaaaattattatcgatcagcaagaagctttaactgattatttaactgggttgcaaacacatgatgctaagtatcaaacttctttagtttatgtcacaagaggatcaagaaaaacagttttccttttaaatgttcaaagatctttagaagagttagataattggatatttattcgtttaaataatggtcaaggagatttgctttttcaattaatgcatggtttgcaacgagttgcaggtatttcgttagttgacttgttaaaaagtgttaaaagtttgaatattatgggaaagggaattactgggcaagcactacaagaatcacagcaaattgattatgatgagtatatttcaattttgctaagtcgtttaaaaaagcagggtaagtcaattctaatcggaatagatgaaattgaaattagtgacgatgttcgggcttttggctcagaatatcaaacattgattggtgatgaataagatatttcattattgatgacaggattgccaagcagaatatccgaagtacagaatgaataataccctcacgtttttactatgtagtaatcgtgtttatttatcaccgttggatgaaaaaacaatagctaatagctatgagaaagcatttactaaaggaaaacgtgaaattgatttcatggtattggatgaaatgagccgtgcagttaaaggctatgcttatgcctttcaaacgattggttattatgcttggcgatttagtcgggaattattgcagttaaacgaagaagttttgaaacaaacaattcgagctgcaaaaaaggacctttttaggaatgcctatgaaagaatgtatatggatctttccaaaactgatcgcgattttatcgaagcaataatcaaagctggaaccgatcgtgtcacgacaaaacaattgcaagatatcttaaacaagcctattaattacatttcggtctatcgtgcaaggctgttagatgatcaattgattacatcccctcaaagaggagtagtacaattggcgttgccattttttgcagagtttgttgaaaaatctaatttagaacatttatcttagaaaatgagcaaatataataaattatggcaatatatcaaagataataaggctggggactttgagctttcttttgatgagcttggccagcaggctggggttgccttagatcattcctttttgcgttataaaaaagaattaccagcttatggctttgaggtgcaaaaaatttcattgaagaataaagtggtgaagtttcatcagttgtaatgaaagctattaataactaaagtagtagtttgcgataatatcttcaaaattagtaactatgttttgttttagaaaaagactaagatgtaagtaaaaaatgggaggattaataagttactatgaagaaggttttatcttggccagtatattatcaactatcagagatttatacggcgccattaaatgtaatttggtttgtctttggcgcggcaatgtcgtttcaacaatatcacatgtttaatttgattaacattttactgtgcttagtagatgtttttctgtttgatttagcagttaatattgctgataattactatgattatcttcatggcaaagatcgacattttttgactgatataaatccaattggtcgtctgaagttacctttaactgatgttagaaacttagtgtggattagttactttatttcggcgattccgggtattattttggtttatcgcaccggctggccagtactaataatgggagttgtaggatatttcattggaatattttacactgcgggtcctaagccactgaatgcaacaccgatctgtgaattagtggtatctttttttatttcgtatttcattatgctagtaagcatctatgtcacaatttacggcacttatcctttgacctggaacttagcattaactactctgataagatgtttgcctttaacactcattttctatgctttgcagttagctaataatacttgtgatttgcatgaagatttaaacaatgggcgccatactttagccagttatactggtaaaaaatatgctcttaaaataattaagacgttgattattgcgggattattatttccaattatcgttgttctttttggtttagcaaaatggccattgatctttagttgttttttgttgccaatattatggccaaaattaaaacaattttttgagcatccggataaacaaactacctatttacaaatgattaagtatttatcaacgcgtggtgctagttaaatcgttctagacaataagccaaattataagctaaaattgcaatttccaaccggctttgaaagcctatcagactacgtgctcgattgttctcggcattgtaataggtcagaagcgaaaagtcgctttcaattgttctgcgaatagccatcaattgatgatcattgtgctttttagctcctgtcatatttttacgatatggtgtccaaagttcataacccatttgttttagctgttgatgcagttctttgcctaaatagccttcgtcgccaagaagatagtaattagatggatgggtattttccagcagttcaactgtctccctggcatcatgaactgatgcttttgttacgacataatcaagaatgtaaccgtcatcgctaacaatgacatgaactttgaaaccatagaagtaaattttcttggtggccttataaccaatgttggcataaccgcgaaaaattttagcacgatagttgcgaattggttggcaaacaggtaccggaaagctgtcaatgatcaagaaatgtccattcaggtcaacctttttattcatttcttgccgtatctgataaatcaattgcaatagctgacgtgaacgtcgattaaaacgtgagtgtgataaacaattgaaacattcacagaatcttctttgtgattcaattcctgtcttagcttgccagataagtaaagccaaaatcagactgtccgtagttttaatttgatcaatatttcgccgatgagtaaactcagccggtgcatacaaacgataccagtgccgacaaattatcactaaatctttaaaactaacttgtaaatggtggctaaaacgcttaagcttaaggcagttcaatcagatcaggctcttttctattattatacaagttgagtctaacaagattggacttttttattaactaaaacgatttaactagcaccacgcgtatttatcaatatttttcattacatatatagctatttatacagttttggttttagtttagaggaaaattatggctttgaatatcatagatagaggattacactcattgataatgaggggggaaaataattatgtttggcaaaaagaaggataagaattcagaattttcaccagatattatgactttaaaaaatgcacttgaggaagtacgttttacgcccgaagttgagcatgacgcagaattaattaacatgtttgacgaagcaattgataaagccgagaagggtgaatctgttcaaacaatttatggtcgactcagttatcaaattacgcaatatattcaaacacatcatttcaaggcacccaagccagtaactgaattcttacatggaagtactggaagcgtagccacgggattgacttcagttccagtttcttggaatacagtacattaggaattttttatgtgcataaaattgacaaatactgaaaaataattgattaattaaacagagtagcaggtaatactactctgtctttttattgcaaatatgatgtcaaatgcgaaactgtaaaatagtttgtgtaaggatgaatatttccttaattttattttcctgaatattagaaaaaggaatccttttcccgtatgattgatttgaacgaaaaacatactagaaaagagattccttcatgaatgattttaccaaagatatggctaatgctctattcaatcaggataaaattaatgatttatttagacaaaagctccaacaggctgtcaatgacctgcttgaatccgaattgactgcctttttaggctacaatccttatgagcgcgatggctggaataccggaaattctagaaatggtgcttattaccgcaaggttgatacgcaattcggacaaatagaaatcaaagttcctagagacagaaacggtgagtttcatcaacacactatgccagattataaaaggcatactgatgttttagagcaaactgttatcaagctctattccaagggcgtcacaacccgagaaatcgctgatttgattgagaaaatgtatggcggctattattctccagctatggtttccaatatttctaaagaaatgattcccaaagttgaggcatatcatcagcgacatctgtcagataagttcttctgcgtttatctcgatgccacctatattcctcttaagcgggtcacttatgagcgcgaagcagtttatatcgccatcggtatcaaacctaatggtcataaagaagtgattgactactgtattgcgcctactgaaaatattgagatttggagcgaaatgctcaaaggcttcaagagtcgcggccttgaacaggtagagctcttcttgtctgacggagtagttggcatgaaagaggctatctgccagtcctatcctaaagcgcattttcaacgctgcttggtacacgtcatgcgtaatatcagtgccaaaatgcgggttgacgatcgaaaaaagcactggatgaattcaagcagattcatactcagtcaaacaaagaaatggctgtacaggtgctgcatgaattctatcaaaactgggaaaaagcctacaaaaacgtagttagagatcttagacaggttgagcctgatctgttaaccttttacaactatccgccagctattagagcttcaatttactcaactaacatgattgaatcctttaacaacaggcttaagcggaaaaccaagcctaaaacagaatttccaactgagcagtcgcttgacacctttattggagttcaggcaatggattacaatgaccgttactttaacaggattcataaaggatttgggcaagttcgagacaccctagaatcctattttgattaaaagataaataaaaaagtcaatcaacgagagagattatttacacaaacttcttgacagtctccaggattgcattactatagtttatgtaaattatgaataggtagtaagtaacttatgaatttcaagatattcattgatttaatgaggagaacgaaaatgaaaattttcaacaagaaaaacttattattgtcatctgcagttgttgcagggatgctattcacagttggtactaaggctgttcaagctgatacaaccgatagttcacaacaagcaactacaaatactttaaaggtaaatgcaaatactgcagttccagataagaatttgattacgccagtagctagccgtgataatcaaactcttcgtcaagttgcagaagcaaacaacacttcattaagtgtattggaaaagttgaatgataatattgatccagataaaaccattgctaatggcacgccattatatcttccacaaaatgaagatttgtcaggactatttggtatatatcttagatcagatacttcagttccaagctcattaaagagaaaatattatgatagtctttcagcaaaagagagagctgctaagatgtggattattgcacgtgaatctggtggaaattacaatgcaagaaatggtatctatattgggcgttttcaattaacaaatacttatttaaacggaaattatagcaaagcaaatcaagaaaaaacagccttacgatatgttaagggacgttatggttcatggtcggcggctaaaagattttggcaggctcacaactggtattaataaataaaaggaaagtggaaaaattgaaatttcaaaaattagtaactagtgtattattagtagctagtaccactggtgtattaatgactgcacctaaacgggttcaagctgtagctgataccaatactactgagagtggaaaacccgtcgcaaatattgttaataagcctaacctaacaaaacaaggttatgtgttaactattcaagccccatcagggaagatttatgtagggcaaaagaattacaagaaacaattaactactactaagccaatatctaacgcaaaatcagttagttggaagaaaattaaaaacgttagatttagaattgaaaaagttgcttatgcgacaaaggttataaaatttggtggagcaccacagtatctgcttgtctctaaagataaaaaatatagttgctggacaacgcgttattctattaaatactatttttggaatactaaaaagatgcaacaagtaattaagccattgtctaaattgacaactagaaactcttcaagcctaaagaagattcggaataagcaagattttaatcaagctgtattagctgctaaaagattacctgctaatcaaagaaaagttgtcttagaatctttgaatcaagtgaaaaaagttggcaatattgataaggctgaagataatattttgttgttcagcttttagtgatatttctagcacagatttaaaattaatataaaactgaagttagaagaatttatttaatgttgagggggaagaaattgtgagaagtatatctaaaggcattgtatctttgatagcagctacaatgttattagcagcaggggaagggatagttcctaatactgttaatgcttctatgctagattcggctaaaagtagccagaatagtcaagaaagtagtagatacacttggcagagtgttaagctaacagatggaactgaaatgcaaattcttccagataattcttcaaaattagctggaaagattaaatataacggtcaaatatattcatatcgcattgtttcaaataatggtgtatatactatttatttgaataatgaggaagtatattcagttgatataaataatagccagttacctacgacaagtgtaggtggttttgatccatttattaattttacgtacgcaaatggtaaggtagcatttaaacatgcaggtagaaagtattattatttgacgacagagaaatatagtgcagatacggtaagaagactgaaaggaactactaaggatattattattggtttgcttggatttgttcctgtagttggcccctatgtttctgccggcggttttgcctatactgtttataatgatatttttggaaagaatcctaaaaataaatggtatacgataaaagaatattgcactagagggtatgaatattatgcttggaagacctatacttatactgactctcatagaaaacatctacaatctgttaaatgggagtataaaaaagtattatgagaggaattttaactagtagagttgctagaggcatattagcgtttatatttatattttttacgggttggtctgctgcaagattaatagtacagatagaacgttctgaatcgatatatgactaccttattttgggaggatttagtctagttttaggtattttggaactctatagattaataaatagtaagtaacctgaaaattttagaaaattgaacgttaacgtgaatatcaatataacacgcttagcttaaatagtcttattagtttttataattcagtaagataatcggcaaattggtaatatttagttgtagtcgcttcaaaggataaaaagtattcaacttggattactcaagctttcttgcaatactactacctaaacagcaagtctatgcaaggtgtgattaagccactcaagcgaattgctaatagattaaataccagtctgaagaaggcaaacaacaaacgtgactttaacgctgcaatgaaagctgctaagaagttacgtggcagtcaaagagattttgttttacgttcattgaatcaacttaagaaggatggctccatgaatgtagaaggaaagaacttgttattgtttggcttataaaattaagatattaagtagtaaagctcagcagaattgcttgagctttatttttttgtgaacggcagtcgacaaacagtataatgaacttatatcaaaagcactgaagttatttagaaaagaagatggaaaatggctaaaaaagttacgccacgcttggtattagcgattttgtcggcagggatgctctcatttttaggaatattggatgaaacggccacgacagttacttttccaacgttaattaaagaattttcgattactactgatcaagttcaatgggtaaacacactagtcttattggtaattgcgaccattgtgccaattagctcacagattagattaagaatttcgactaagaaaatttttattctaggagttcttttgtttactttggggctaatcatcgatattttatcaccgcgctttgatttattgttattaggacgggcaatgcaaggagtcggcacggggattggcttaccgttaatgtacaatattatcttggctgaagtacctaaagaaaaactaggctttatgatgggaatcggcactatgattactgcctgtgtcgttgccttagggccagtttttggcggaatgattaccgatgcacttaattggcgctggatcttcattatttcgctatttttaatgaaaaacgcccggaaattccccgtattttaatgcggggatggatagggccaagctgacctaatggtcagctttttttattaaaaaatgaagacatatgttcgactttcctgtaaaatataaatatctaatctacagaaggaggtgaaacacatgaagagaatgagcagtttagcctaccattttggcttgaaagtacgcttttatcctagttctaaacaaaagaaaatcatcaagctaaattatgatgctcagcgttttgtctacaactcttatgtaggacgtaatcggaacaattatcgggctaagggctacttagctgttagacaatatcaagtaatgccttttgccttttctgttcttaataattatgagactaagctagcagaagaagtagtcgccaataatgagttattggctaagccaaagaacattcgcgatgcctatagctttttacgcgttaaagaaattgacagtctcgctattgccaatgcgattcaaaactatcagaaagcttggaacaactatcgcaagcttggtcatggaattccgacttttcacaaaaaacgtagtgattggtcatatcagaccaactgtcagtatcctaaacagacagaagcctttcttgataacgggacagctagatttattgatgctaagcacgttaaattgcctaagctaggcgttgtccgcattgccagctttagaaaataaaattgattaaagagcgtttgcttaatcatatcccaactagaattggcacagtcacgattaaaaagaccgctgacgaccagttttacttatcaatgcaactaggcagcgatattgcctttgttaaggaattgcctaagacgcagagtcaaattggcatcgacctcaatcttgataatttcttaacagcatctaacggagcaatggtggctaatccacgattttatcgcaaaaccaaaaagaagcttgcccatgcccaacgtgtcttgtctcgcaggcagcgcagagctaagaaagagggacgcaatttgcgcttagccaagaattatcaaaaacagcgtctagcagtcgctaaactgcacgataagattcgcagacagcgaaatgacttcttgcaagtactctcaactgcactaatcaaaaaccacgatttagtagttgccgaggaattaagaagcaagaacctgttaaagaatcatgccttgtctcaagctatttctgatgttggctggcgcagttttctgaacatgctggcatataaggcagacctatatggcaaagagttcaaaacaattgatcctaagtacaccacccaaagatgccatcaatgtggcagtattatgggacaaaacggttataagaaattaacgcttaaggatcgagaatggacttgtccaatctgtcaaacgcatcatatccgtgattggaatgcggcagtaaacatcttagaaaaaggcttaggcaactggcagaattctaaaataaaaaaagcagcctaagctaggctgcagtccgctcgcaactcgcggactcaaaaggctttggtaattagacgacctctatcggcaatagtcaaaagattattgttggtaagtcaagtccgtatctaagcaagttggtgttctggttagcgcaagctaacgagccagccaccaagccccagaatttattctggggtagttgacttatcttgagtctatttacgggaagctattcaattcggcagattaatccgcttgaaaaagtgaagttcaagtatgtgcaatggctatctttggctattgggctggtctgtttaatgctgggctttacacggattgctaaacattcatttttctcaattcaagttttgggcttcttaattctaggaattattagtttattaatttggctaaaaatatcttggtctgataaggcggctttgattagtccgaaactgtttaaaaatttacgctttagtatgcagctaatagcttattgttttgccaaaattgcaacgctagctttgggcttcatctttccaatctatgttcaggctgtcaatcatggttctgtttcattagcaggctgggttactttccctggtgcggtaattaacgcgctaatggcggctgtagcgggaaagctgtttgataaaaagggtgcgcggctgccgattattatggggataatcgctagtttgattttgatgaatgttttagccccattaagcaacctggcaattgtcttgttatacgttctttattatggcggatacgggatgtgctttggcagtttgatgaccagcggtttgatcactttaggcaaagaaaatcatgcacaaggtaatgcgatttttaatactttgcagcaattttcaggtgctttaggaacagctttagctgagaccttgattgcgctagcgcagaataaatatctgactaatggcacagcagtcggttctaagtggacatttatggtattactgattttgataattattaatttgctcttggctcttgcctttgtgccgaagaagaaatgaagggaagttcagcgaaagctggacttttttaatttaaaaatatactaactctaaatacgcaatatttgcttaatatattaaacaaaattataattattttgattaatataaattacataggagcaaaacatgaatccagatttacttgcggcacttattcttgaaggtcagaataatattaaaaatattgctattattcctcgtgattatcattttgaaaatagtttaaattatgtgttagtaggtttgcggcgggctggcaaatcaacgctattatttaaaagggcgcaggatttagtgaataaacaaaatgtggattggtcacaaattgtttacttaaattttgaagatgaacgattagatggttttcagttggctgattgtaataatatcttaattgcagccaatcaattaacaactaagaagcattattttttatttgatgaaattcaaaatattgctggctgggaaaaatttgctcgtcgtttagcagatcaaggtgaaagtgtttatttaaccggtagtaactctaaggtgttgggtcatgatattgttctgcggctgggtggaagatatatgaccaaatatgtggcaccttttagttttacagaatatttaactgctaaaaaaattccacatgataaattatccgtcttggatacagttaataatggccaaattcgtgctgccgcaaatgaatatctatgttatggtgggttgccagaatctattatcttaacagacaagagaaattacttaacaagtatttatcaaaatgtatttttagctgatatcattgtccgcaataagattcgtaatgaaaagacgatttcattattacttagaaaaattgccgatacagtaatgcaccaagtttcagaaactgtcaaatcttttgtgtaaatagttctttctcgtaaattgattttttaattatttatttaatcaaagtaggattctaaggtgtcctgaacctgaccaaagcctttatgaattcgattgaaataacggtcattgtagctcattgcctgaatgccaataaaagcatcaagcgactgttcagttggaaactctgccttaggcttagctttgcgcttgatcacattgttaaatgattcaatcatgttagtcgaataaattgaagctctgatctgcttgggatagttataaaagaccagcagatctggttctatgtctttcaagcttctgataacatggctgtaaaccttgccccatttggtatagaagtcatgcaggacagctgtggcttcttctttgtttgtctgttgatgcacctgtttgaattcgttcatgatcttttcacgatcgtcgacgcgtactttagcgcagatattgcgcatgacatgaaccaaacagcgttgaaaatgagctttaggataagtcctggctaaggctgttttcatgccaacaacaccatcagaaagaaaaagctcaacttgctttaagcctcgggatttcatgttttgaagcatatctgtccagacttcaatgttctcgctaggtgcaatgcagtagtcaatgacctccttgtgcccattaggcttgatgccaatggcaatatagactgcttcacgctcaaacgtttctcggcgcaaaggaaggtatgtcgcatccaaatagacgcagaaaaacttgtcgcttagcttgcgtttgtggtaagcctcaacctttggaatcatctgcttggaaatatttgatacctgagctggactgtaatggctgccatacatcttttcaattagatcggctatttccctggtggtcacgcccttggagtaaagcttgataatcatgctttccaagatatccgagtgctgcttgtagtcaggcagcgtgtgctgatgaaattgaccgttgcgatcccgaggcacttgcacttcaattgggccaaattgcgtatcaactttgcggaaataagcaccatttctagagttgccagtattccagccatttctggcatagggatcatagcccagaaaggcagtcaattcagcttctagcaagttattaacagcctgttgtagttctttgcgcaataaatcatttattttgtctggattgaatagagcttgagcaaaatctttggtaaaatcattcatgaaggagttcttctttctgtatgtgtttttttgttcaaaccaatcatacgagaaaggaactcctttttctaatgtttaaagaaataaatttaaggaatcattcatccttacacaaactattttacagtctcaagtttcatatgcaactttgtataaaaatataaaaaatgtgattagtacggtaagtcgcaattcgattattgattatatcgattacgctaaggatgcatatttgttattttccaccaaaaattattttgctaaatttagtgagcgtgaaagcagcccaaagtattattttacagataatggcattttaaatttgttttatctggataaattgccagcattactagaaaatctagttgcgatcaagttgcataataaatatcaagagaatttattttatttaaaatctcaaaagacagggatagatattgatttttatgtaccagctagtaaaattgcaattcaagttgcatgggaagtaaatgatacgtcaaaagaacgtgaagttgggaacctaattaaattagctgataattttgatgaagttgaaaacttaataatcgttactcatggtgaagaggctgaaattcagcaagaagataagataattcagttaatgccactatataaatttttattaatgagatagtttttcgataactcataaaatggtaatgctcaaaattttttgagcattttttataactataagatctaaagagatataaaaatggacataagatctaaagagatataaaattaaagccaacaactaaaataatgaaaataggtgaacatcaattatgtctgaaataacgaatccatttgaccctaactttggcaaagttcccaaaatatatttggggcgacaaaaaatagtagaagatatagtaagatcacttgaaagtggcaccggaccctatcaaacttcaatgatctatgggatgcgcggggttggtaaaacttcattacttgctgatattacctcaactttagaacaaaaagataactggattgttatttacttagccatgacaaatgatttgcttgccacgctcatccaaagtatttatcaagaagcagcgaatccagtaaaaaaggcgttgaacaaaattgatggtgtaaagttttcggcttttggctttgaattggaagttcatatatcaaatcctcaatctacttatcaagtgttacttgaagaaatgttaaaagttttaaaaaagcatcaccaatctttattgatagcaatagatgaggttaaagaaactcctgagattgttaatttggcgtctatctatcaaattatggtgttaaaaaagtattcaattaatatgatgatgactgggctgcctaagaatgtttctgaactccaaaataatgatgtattaacatttcttttaagaagcggtcgtgtaccattaggaccacttgatcttttcgatattaagtatcggtatcaaaaagcatttgaaagaggtaataaagagattaataatactgccttaatgaaaatgactaagctgactagaggttacgcttatgcatttcaagacttgggatatcatgtttggcaacattctactgatcaggtaacagatgaaagtattgaaaattcgatctcatcgtttaaaaatgatctgtttcgtaatgcttatatcaagattatctctgaattatcgccagtcgatcgaaaatttttattcatcatggctcataatgataaaaatgttgttaatataagtgatattcgcaagcaaatgggaaaaagttctaattatatttcgcaatatcggcagcgattaatggatagtcaggtaatcattgatgcaggatatggcaaagtggcattttctctgccattcatgaaagactttttgttagaagcagaagaattatatgaaattgataattaacgaaaaaagctgctaattaaactcttcgctttcgtccaccaaacgtgtaagcaataagccgaagtgaatgacaagatccaggttaacagcaagattccaaagaaagttaagaatgggtggtaaatggcgtgatattgcatgttaagaccgcgccaaactaattgattccagaagacattggataaatatgcgcgataagcataagtagccaagaaatggaatacttttaaactggtttgcgaattttttctaacttgatgcaggcaaaaagctgaaatcagtgcaattactgctaaacaataaagagtcattgacggcttgtaatatggtgcattattgaagttgattggataaccgaacttgtgcaactcaacattagtccaaatgaagcaagcaataaataatatggtaattacccaccaaaacttagtgaccagctggttgtaataaccacgcaatcgccatgctaagacaccatacacaccatagatgaagaatgaaataaaaatgcggtcgagtaaataccagtcatgttcgtgcatgccatggaagacattgtaatcatagaaccaaagccagacaaaatagagtacgaaagtgattactgcaatccaaatacctcgagttagattgtgtcctacatagcggcttaatccccagaaaagcggcattaaaatgatgaattgcaacatcatcgtgttataccacaagtgcggggcggcgttcccattaatgaattgccagcagaatgaaccaagattgttaaaatggttaacttgttgcagccatggcatccctactaggtagattaacgtccaccaaatagtaggtacaaaaagattagaccaatttgtctgcatatgttttgcataagaaaaactatttttttcattattagtacggattgtggtatacaaaataccaaaaataaaagctggagccgtatatttgactaaattataaaaaacgccaaaaacatcttgtgtgtgaaccggttgttctacgtccatgaccagcgacataattggctgtgagattactgcgctgcaggcgaatacttttaaataatcgccaatatcagctatttgatagcttttaaattgatctgttttcatgaacttgctctcttcttttcctaatattattgtgtcatttttttaaattaggcgaaaggataatcatgttaaaattagtttagctattttggaaatggggtcaaaatgtcagtagaaaagatcacacaaaacgcactaaaagcattgctttatgaagtagttaccaatcctaagccaggtttagtggatccagttgacgtggggtctcatcctgatatgaatgtgtatttgtttattaatagcagtttgagtttagaaaattattttcggcaagcagctaaaattggagcagattttacggggcaggatttgcggcaaatgtttgaacaattgcgtcaagctggcattgaggcagaaaaagcaatgtttaagacaacgcataatataaatacccataaaggcgcgattttttcgttagggttgtttggctgtgcaagtagctattgtgaaaataataatcaaggtgaatttgaagtgatccagcagatgactaagggcttagtaaagcacgatttaggcaagaggaatgagactgctggagaaaaacaatttttgcaatatggtaaaggtggagttagagcagaagcagaagctggttatcctttggtgagggatgtagcactgccatttttagctcaaaccgaaggtgatttgaatgttcgtttactcgatacgttgatgaaaatagttagtgcgattgaagactcgaatttaataaaaagagcgggaaatattgaggttgtttcttgggcacataatcaagcaaaaaaatatttggcattaggtggctacggtactcaagctggtaaacagtttatgttagaactaaatcagatttttaaagagaaaaattatagccttggtggcagtgcagatttattgattattacaatttttatggcgttgcagcgtgggattatttaacgcaaaaattgtctagttaagaactagacagtttttttgctgtgtgtcgggcatggcatttgtttagtctagtgaaagtctagatcacgggtagttgtcgccaagtgtagcgaaccacaagccgttagcggtgacgctatgggtgaaggaagtggctagcgagttttccgagcctacgtacagaaacctggtcaggccaaatggtggatgagactgcagcacaagttaaagtccaaaggacaaccgtaaaaccaagacggtaaaccagggggcagtggaaaattaaagatgaatgtcttaccccgagagatctcgtggacaggtgaaaccgagtaagctttaatatcagcgatcgtaagcctggtcgaaaaaggttaatcgcgagaagtcagctgaggtcgtagtagtgctgaaggttttgtaatgaaactggagcgaagggcctaatgtttgtaagagcatatctcgctataagcaatgttcagacagtccggataagaggatagcctagcacaaagagaacgtaactctttgatggtgaaagcaattgggacaattctgaataaatttacaagtagaaatggagatatcacgagatggaactaattgaacagattttaagtcaaaacaatctcagggaagcaatcaggagagtcaaaatcaataagggagcgcctggtgtagacaggagaacagttgatgagcttgatagctattttaaaaagcatcaagtagaaataaaggacgccatcatgaagatgaagtatcgtccgcaagctgttcgcagagtctacattcctaaagctaatggtaagaaacgtcctttaggaatacccacggttgttgaccgagtaatccagcaggctattgcccaagtattaatgaagatctatgatcctcattttagtgagcatagctatggctttagacctggacgcagtgctcatgacgttattgaacaagtcttggaatatttaaacgaaggctatcaatgggttgttgacctggatattgagaaatactttgacacggtaaatcatgataaattaatttcaataattagagagcaagtaaatgacaaaaccaccctccatttaattcgagcctttcttaaagctggagtaatggaagatggttgggttaagcctaataaactaggtgtaccacaaggcggccctctttcaccaattctatccaatatctatttagataaaatggataaagaattggaacaaagaggcctgcgctttgtccgctatgccgatgactgcaatatctttgtcaaaagcggtaaatcagccaaacgtgtgatgaattcaatttcatcatggctagaaagaaagctattcctaaaggtcaacgcaaccaaaaccaaagttgtacgaccaaccaagagcaactttcttggctttaccttctggaaaagtggcgaatactggcaagcaaagccaggagatgaccgcaaaatcaagctttatgacaagatgagagaacttctctgtcgcagaaaagcagctgctcagcctctatcactagtctttactaagataaatcaagtagttagaggctgggtcaattactttagagttggcgacatgaaatattttctaattaagttcagtcaatggctgcgtcataaagtacgggtggtaatcattaaacaatggaaactaccaaaacgaatatacattaacttaatgcggattaacaaggcactaaagtgcaattttagtgatgaagatattcataaagtagctaatacgcgcttaggttggtataaaagaagtacgggtcatgtcattaactttctgcttagcccaaaagtattgggcataagcaaagcggatcgcccaggcttggtcgatccgctagaatattatttatctcgtaaataatcacaaacgtagcgccggatacggaaccgtacgtccggtgcaatgagaggggcgagttataaaactccctctactctattttagatttaaagagatttaaaatgaaaaatccttttaatccgacttttggagatataccacaaatttttttaaaagataattcggataatgaaactaaaaatgtagattcaattttctatttaggtttagataccgagtattgaaaaagcattaagctattgcagatagcttaatgctttttttactatttgattagatctcttataatccaaatgcaattttgtataataatgcaccacagattccacctgcaattggtgcaaccactggtacccaactgtaatcccagtgggctgaacctttgtgtggcaaaggacataaagcataaacaattcttggacctagatctctagctggattcaaagctggtccagttggcccaccaactgccataactaaagcagtaattaagaaaccaaccccgatgttagcaatgtcttcagattgcttgaagaacatgccacgatataaaccaactgcgatgaaaagcaaaatagcagtgccaaagaattcggtaataaaaccgttgaacttactgttagccgaatcaccagtcgcaaaactggcaaaaacagcatcatcactagtggttctgccaatgtaaggccagtagacggctactaagattagttgtcccacgatggcaccaagcatttgtaccaagatgtaaggcattacttgatcccatgggaagacgcctgaacaagcctgagctaaggtaacagcagggtttaagtggttccctgaaattgaacccaagagcatggctgggagcattactccaaacccaaaaccgaaggcgatcaagagccacccaccattggcttgaccgtcacggctattaccaccggtatcacgtagtacagaattggcaactgatccgttacctaaaacaactaaaataatcgtaccgaaaaattcggcaaaatacttcattaaccaagtatgttccataatagatactttcttctcctttagtagaaaaaataagtgaaaaatagtacaaccaaaaattatactcttaactcgaaaaatagatatagttttttgtaaaaaagcaagaaaatagcattaaaaaacactaacttttaaattaattaaaaagatttactatttggctgcaatcatcacaattttctaattatccagcaactcaataaattagaccgttccaaatatgaacattatttaacaagccctagataatgccaaatctacttttgacaaataaatgcataatcattatattaatttcacaaatttggtatatagctttatatatacttaatatataactttaagcgctttcaaaatattgtggtactatacagttgttcacaattaatatgcataaaaggaaagagagtagcagttaatgagaacaatatatttggtgcgacatgggcaaactttgttcaatgtgcatcataaaatacaaggtacttgtgattctcctctgacggaattagggaaagcgcaggcgacagcggtgcggaagtattttttgcaaaaagaaattagttttgatgccgcattttgctcaaagcaggaaagggcaagcgatactttagaaattataactgataatcaattgtcttatacgcgactgcgtgacctgcatgaaaaatctcatggtgaatatgaaggacaagatgaattcatgttgccatggcgacgtggctttagccgtattaatgccgcaatggagccggatcaacatgttgaagaaagaatggaacgagcgatcactaaaatcattgattcaacccatgccaacgatacaattttgattgttggacatgggacggctttaaggttatttacgcagcgagtaaatccaacttttaaagaatatgataattgcgggatagtaaaaatgtctgctgttgataataacttgaaatatttaagttatgtagcacccgctaaagatgggttttgagactgtaaaatagtttgtgtaaggatgaatgattccttaaatttatttctttaaacattagaaaaaggagttcctttctcgtatgattggtttgaacaaaaaaaacacatacagaaagaagaactccttcatgaatgattttaccaaagattttgctcaagctctattcaatccagacaaaataaatgatttattgcgcaaagaactacaacaggctgttaataacttgctagaagctgaattgactgcctttctgggctatgatccctatgccagaaatggctggaatactggcaactctagaaatggtgcttatttccgcaaagttgatacgcaatttggcccaattgaagtgcaagtgcctcgggatcgcaacggtcaatttcatcagcacacgctgcctgactacaagcagcactcggatatcttggaaagcatgattatcaagctttactccaagggcgtgaccaccagggaaatagccgatctaattgaaaagatgtatggcagccattacagtccagctcaggtatcaaatatttccaagcagatgattccaaaggttgaggcttaccacaaacgcaagctaagcgacaagtttttctgcgtctatttggatgcgacataccttcctttgcgccgagaaacgtttgagcgtgaagcagtctatattgccattggcattaaacctaatggacataaggaagtcattgactactgcattgctcctagtgagaacattgaagtctggacagagatgcttcaaaacatgaagtccagaggcttgaagcaagttgaactctttctttctgatggtgttgttggcatgaaaacagccttggccaggacttatcctaaagctcattttcaacgctgtttggttcatgtcatgcgcaatatctgcgctaaagtacgcgtcgacgatcgtgaaaagatcatgaacgaattcaaacaggtgcatcaacagacaaacaaagaagaagccacagctgtcctgcatgacttctataccaaatggggcaaggtttacagccatgttatcagaagcttgaaagacatagaaccagatctgctggtcttttataactatcccaagcagatcagagcttcaatttattcgactaacatgattgaatcatttaacaatgtgatcaagcgcaaagctaagcctaaggcagagtttccaactgaacagtcgcttgatgcttttattggtattcaggcaatgagctacaatgaccgttatttcaatcgaattcataaaggctttggtcaggttcaggacaccttagaatcctactttgattaaataaataattaaaaaatcaatttacgagaaagaactatttacacaaaagatttgacagtttcgtggttttaaataaagcagctaaaaatgaaatgttagttgtgcgttaacgaaaagagaacaagcatgaatagagataattatattttgtggtttgatcaattgcatcgcgatgatgttgatttagtcggtggtaagtcatcctcattaggtgagttgacttctgaaacgaatgtcccggttccgtatggttttgcgactactgccatagcttatcgccactttatgaattattctgatttaaatcaaaaaattgataaattattggccactttaactgatccagaagattctgagcaattgcatcgaatttgcaccaaaattagaaaattaattatagaagcgccgatgccaaatgatttagccttagaaattagctgtgcttacgatagcttagcccaaaagatgcaccaaaatgagccattcgttgctgtacgttctagtgcaactgccgaagacctgcctgatgctagttttgctggcgaacaagatacttatttaaatattcatggtcgtgagaatgttttgaaaaaggtgcaagaatgttacgcttctcttttcaccgaccgggcaacttattaccgaattaaacaaaactttccacaagaaaaagttgctttatcagctgcgattcaaatgatggccttttctaaagcagctggtgtgatgtttacggtcaatgtagcaactggtgatgacactaaggttatgattgaggcctcttggggactaggcgaatacgtggtgtctggaactgttacacccgataactatgtagttgataaaaatacgatgaagattgtacacaaaatggtgactaaaaagccaattgagttgatcagattgccatcgggaggaacaattgaacaaaaggtagcaccagatcaagtgaataagcctgctttgactgatgcgcaaatcattgaattagctggttatgctaaagaaattgaaaaacattatggctgctacatggatatggagtggtcacttgatcaaaatgataagttgtggttagttcaagcacgcccagaaactgtttggtcacaaaagaaaaagcaggagaaaaccgatgcaccacaagaagcaactacagaacaccgagtattgttaaaaggcttgccagcttcacctggttttgtctcaggcaaggtacatattattgatgatccaaaagatatcaatgaatttaagcagggcgaggttttggtcactctaatgacgtcgcctgattgggtgccagcaatgaaaaaggcggccgcaattattaccaataatggtggaatgacctgtcatgctgcaattgtatcacgtgaaatgcagataccttgtttagttggaacaactagccgtggacaagctgctacgaaaactttgaaaaacggcgagactgtcaccgtcgatgctaaaaatggtgtggtttatgctggagttgttaaagacgcggttaaaaaagtcgatgaaaagccagctgagcctgctgcagttgaatatttcccaccaactgcaaccagagttatgatgaacttaggagatcctgatcttgctgaaaaatatgcatctttgccagctgatgggattggtttaatgcgcgaagaatttttatggacgacttatattcaccagcatcccctttatttgattgaaactggtcatccagagagggtagttaacgagctagctaatggaatcggtaaagtcgcgcgggcaatggcaccacggccagtagttttacgtttttcagactttaagtctggcgaatatcgcaacttaaagggcggcgacaaatatgagccgcatgaaccagcagacctattaggctggcgcggtgcttctagatattatgatccaaaatatattaatgcttttaaattggaacttgaagcggtaaaaaaggtgcgcgatgagttcggattaaagaatttacatgtgatgattccattttgccgaacagtggatgaagcgcgcaaagtgacggaaatcatgcggacacaaggtttagttagaagcgcagacttcaaggtttacatgatggctgaaattccagctaatattattttggcggaccagttcaatcaatttattgatggttattcaattggttcaaatgacctaacgatgcttttactggggtgcgatcggaataatgatgtgattgctgatctttttgatgaaagaaatcttgccgtcaaaagggcgattagacacttgataaaggttgctcatcaagatggtaagacggtttcgatttgtggtcaagcaccatcagaatatccagaatttactgaatttttagtcagaagtggcattgattttgtatcagttaaccctgacatggtgaaggcgactaagctaaatgtagctcattatgagcagaggatcctccttgatcatgcaactggcttaggtaaaaaggatccaaatgaatataattggtaaaatttataatttgatgaaaagtctttgattgcagtattgcagtcaaaggcttttttagagttcaattttgtttttgggcaattttacatttaatttagtaaaagagtaaggttgaactaatgaaatttcgtaagcatctaaggctaatctctcactggcaaaatcagggttatataaaggatcgcctacaataggacttcctaaagaggcaaggtgaacgcgaatctggtgtgtacgaccagtttcaagcgtcaatttgacaatcgcagtattgtcatcatttttttgtaaaacttgataatgagtaactgctcttaatccagtaggatcgattttgcgtttgcgttgatcaagtggatcgtgaccaattggggcattaatcgtacctctttcagctaagtgatcagcattgataactttagctaaataatcgcggtgaaaaattttgctggttaattcacgatttaaaataggtacaactgcaggatttttagcaattaaaagtaaaccaccagttaacatatctaatcgatgaacaatatagggactctgaccaagataagtagtacaatcgttcagagcagtattggtttcatttagattagggtgcgttttttgcccttttttcttattaataattaaaagattatcatcttcatagataacatcgggcatcttaccgcttggtgcataagcctgttgatcactttcaacatgatccaagttaatttcaattttatcaccaggtaaaatgttttgattaaaatagcgatagttgccgttaactaaaatattttgttcaattcgcaaaaaatgacgccacttgcgagggattaaaagttgacgtagtacttcattgacagatgccggagcaagattttctgggtaaaaaagtgtaaaatggaaactcataataatttcttaagtctaatctagttataaacacgtgttttgatagtatggtacaattttcttgtttctaaaaaggagcaatatttaatgaataacgaccaaccaagaagaggtggctttaaagatgcttggcatcgatttgatagtcgcttctttatcggacgctggattattttaatcctgctcacattgatgctcttaacttgtacctattatacaattaaagttaagacatcaaacatagctaatttgaaggcctcgctttcaaccacaactacaatctatgactacaagggcaaaaaagcaggttctttatactcgcaaaagggatcatttgtggaatatgaccagatttcgcctaatattcaaaatgccgtaatttcgactgaagatcggactttttggaagaacccaggttttagtattaaaggcatggtgcgagctgctttaagtttagtgattcatcacggtcaagtaactggtggtggttcgaccttaactcagcagttagccaagaactcgcttttgacccagcagcagactttttcaagaaaattggaagaactcttttttgcaattgaaattaaccatgtttactccaaaaaagatattttaacgatgtacttgaataatgcttactttggtaacggagtttggggcgtgcaagatgcaagtcgtcgctattttggcaaaaacgcaagtgaacttaatccgagtgaagccgcaactttagctggaattttacgaaatcctagtttttataatccggttgatcacatgtcaaatgctttagcaagacgaaatttaatcttaaacttgatggtggataataataagttgacagcggctcaagctaaaatgtatcaaaagcaaggattaactttgcggaatacttttcaaaataaaaacggctatcgctatccttacttctttgatgctgtagttgacgaggcaatctctaaatatggcttaactgaagaacaagtcatgaataaggggcttaaaatttatactactttaaatcaaaattatcagggtaaattgcaggatacttttgagcaaagctggcttttcccacaaaatggtagtgatggaactgaaagccaaggcgctagcgtggcaatggacccaagtactggtgctgttcgggcaatcatcggtggtcgcggtaagcacgtcttccggggttacaatcgtgcaacgcagatgaagcggcagccagggtcatcaatcaagccgttggcagtatatgccccagctttacaaaatggctatcactatgactcgcaactatcgaacaagttgcagaaatttggtaaaaatggctatgaaccgcataatgtggataatggctattctaatacaattccaatgtatgaagctttagaacaaagtaaaaatgtgccagctgtttggctattggataagattggtgtaagtaaaggcgtgcaatctgttgaaaactttggaattaaggtaccaaagagtgaccgtaatttagcgcttgccttaggtggattatcttcaggtgtttcgccaattcagatggcacgtgcatattcagcttttgccaacaagggtaatttgcctaataattctttctttattaccaaaattactgatgcttcgggtaacgttttagccgaaaataataatccaagcagccaccgcgttatttctgaaaatactgctaaagaaatgacgactatgatgctcggcgttttcactaatggtacaggacgctctgctcagccaaatggcttccgtgtagctgggaagactgggtcaactgaagtacctaactcatatggatttggtaccaaggaccagtggatcgtcggttatacgcctgacattgtacttgctacctgggttggttttgaccgcactaacaagcaacactacatgcagggcatttctgaaacaggaattacgcgtttatataaggctgagatggaaggaattttgccgtacaccgcgcaaactgaattcacggagaaggcacctaaccagattgtgaagaataatggttctaatgatgactggactaatggattaggtgaaaaaattcaagatggactcggttctgcaggacagaaaatcaatgaatggtataatagccttaaaggcttatttggccaataaaatttaggaggactagatggttaacatttacgatgctgctaacaagttagcagaagatttgactcaaactgatcaatacaagaagttgcaagaagcaattaaagctgttgaagatgataaggatgcttcagctttattcaaaaagatggatgaattgcaaaataagatcatgcaagcacaacaagctggtcaaccactttcagctgaagatcaacaagcttacaaggacttaaatgatcaagttcaaaagaatgataaaattgtttcacttcttacgaatgaacagggtttgtacgatttgcttggtgaagtacaaaaagcttacactaagccaattaatgatctttatgaagatcttagaaattaatattcgcgatgaaatttattcactttgcggatgcgcacttagatagtccatttcgtgggctatcttttttgccatctgaggaatttaaccatatctatcaggcagctgatcagtcgctaaaaagaattgtcgacctagcattagctgaaaaagttgatttagttttaatagcaggggatacctttgatagcagtcagccgtcaccacgggctcagttgttttttgctgcgcaagtgaagagattaactgatgcacaaattcaggtagtgatgatttttggtaatcatgaccacatgaagcaagaagatctgctagttagtcccagtccttactttaaattgttaggcaatagtgaaacagtagagcaagctacttttactacggatgcgggttttaactatgacgtaatcggcttttcatatctgaataaccatatcactgaggataaaatcccagaatttccagcaaaaggaaaaaattatacttttggtttaatgcatgctcaagagaaatcagctactgctagtcagaatgtgtatgcaccgtttacagttgatgagttgcaaaacttgaattatgactattttgctttgggtcatattcatgcgagaaataatttaagtagtacgccgtggattgtttatccaggtaacattcaaggtcgccacattaatgagatgggagccaagggatgctatctaggtgagattgatggaaatagtggtaagactactattgattttaaagaaacagggccaattttatggcaagggacaaaaattaatcttgaaggagctatcagtaaagctgacttacaagcaaaaattattgccaagcttgaatctggacaaaaaacgtactttagtttgacgattgctggtgctcaatatttgagtgccgaagaacgcgatttagttcaggatcctgatttttggcaaactatttctcaatcgctgccatttgcttctcagttagttgatgtgcgctttgttgtgaatactagtttaaagttaaatgacaatgaccaacaagccttccaagctgccaaagaagagttatttgcaccagctgaattcaagcaaattgttagtgactggcaaaaaaaggatccagaagctgctaaattagcggctgatccagactttattgcggcggttaagaatctaacagaagtaaaactaatgagtaaattgaaaggaattaaggatgagactgaaacaaattaagattattaactttgggcagttctcgaataaaaccttcgatttgcctagtgatcaaattaatgttttctttggtgccaatgaggctggtaaaagtacaacggtagcttttattaaacagatcttatttggctttcatttgagaagtaactcttcaccgttttttgaagattatacgccgctagctcatgttagtccgatgggcggtaatttagtttttactgcagctgatggtgaatacgaacttgagcgactctatgctaaaggcgacaagactaaaaagggaattttaaccgtcaaaaaagatggtcaagttgtacctgagagtgtattttttgatcaaattcaaaatattgatggctctttttacgctgatagttttatttttaaccaagaaatgctgggtcaggttaacagtttaagccaagaggacttgcttgagcgaatttattacttgggggcagcagattctagcaagttactggaaatgcgcgacgattttgccaaagaagcgggcaaactttttaaaaagacaggtaaaaagcccgaagtaaatcgtctgcttaaggaaatgactgatcaacgtgataaattagcgcagactaaaaatgaatttaatgattatgaacagctgcaccaagattttgtacaaaaaagagcggcattaaacagacaaaaacaagatctggctgttttacaaaaacaagaacaagatttgcatgatttgcaaaaagaaatgggcaattatcagacgctgcttgatttgcaaaaacaggtcaaggatgtcgactttaatggtcaaaattatcaaaaagcccaagatattatggctcagggacgtaatttgcaaaagacgattcaatcggtagaagcgcagttgcaggacctgggtgaaaacgatcaatctgattttacgctagagaataagctaatccagcagaagcctcaactcttgcagtggcaagcggaatatcgtaattgtttgcaaaaggctgaccaattgaagcaggagaaagagcaactattagctttgacacctgagttaaaaaatctactcaagttgacaccagagcaaattgaacaaatgcaggcagactatcaagctttgccaggtgctgtcaatgagcctgcttatgtaactactaatgacaagctttggtatgttatcggtgcagtgttagcggcactaggtgtagttcttttggtagcgttgggtacagttggtgtaattgcattaattactggactaattttcctagcagcaggatacttaaaaaatagtaaccaaaataagcaaaatgcggcagtattagaaaagcaaaagctggttgctcaaaaacgccaagctttccaaacaaaatatggattaaatcctgatacgctaaacttaaatagtttactaactaatctgaaccaatatcaaatcaaggagagtgccgcacagactaataataagcaagtaactgtcttgaatcagaatgtggctcaactggcttcaagtgtccaaaatgcattgaagcaaccgattgataatgactttagtcaagttttgaatggtttggacgaacttgagacacgaattagtgaaaaacaagaattgtttcaaagaaaatccagcttaactgcatcactaaagcaggacaagcaagatttgaaagaattgggtctgaaattacaggcactttttgcccaagctaatgtggaaaatatggcaggttacgatcagctttatcaagattcacttaatcaggctaaactgaagacgcagattgcggccttgaaggaatcgttaggcgatgatcttcaacagctgcaaatgcagacaaattcaaccgaattagcagataaattaacggctttgactgaacaaattagtactaagaatgcagaaattaatgaacttcagagtcaagttgctcagttgcaagtgcagttagacaatttagctgattctactgcggtgtttaaggctaagcaggatctggctaatacagaaaccaattttgtccagagcagtaaagaatacttggctaacttgtttgcggcaaggtggatcagtcgctcgcttgacttggcatctaatgaacggttccccaagatgcttaaggcggctcaggaatacttagctttgctaacgggcggcagatatgttgggattaatttagataagaagctaacagtagtcagaagtgatggtaaaaagcgcgaagtaaaatacttgtcacgggggactgctgagcaattatactttgccttgaagttagcttttattgagcagatcaaggatgaaattaatttgccaatcttgattgatgattcgtttgtaaactttgatgatcagcgagtcagctatatcgatcagttattgcaaaagattagcgaaaacaatcaagttttaattttcacagctcaaaagaatttagttgatcagcttgggattgagccattaacttttacgaaaggaacacaggatgcttaagagattgttagattacaacgatggagaagaaatggacattgttgttttgattagaaactcacagttgcgtcataataaaaagaataagttgtttttagcgatgcaattcagtgatggctcaggcgagattcgcggtaattactgggatgctaacaatcaagatgcagcaactttttcaactgggacaatcgttgagttgaatggcaaaagagaagaatatcagggtcgccctcagattaggatctattctctgcgcgtggtcggtccacaagaaggctatgaattagatcaatttattaaatcagcgccggaaccagttaatgagatggaagctgaaattaataaatttgtgatgcagattgataatccgacctggacaaaaattgtgaagtatttacttcaaaaatggcatgatcgtttttatgatcatcctgctggtaaaagcaaccaccatgcggtccgcggaggtttagcttttcatactttatcgatgcttaaggatgccaaaggtttggctgataattatgagcaagtgaatagatcgctactttatgcgggatgtattttgcatgatatgggaaaagtactggaactttcaggttctgccgcaactcaatacacgactgaaggaaatttggttgggcatctggttttaattgatgaacaaattatgctggccgctcaggatatgaagatgaatctggagtcggaagatttactcttattgcggcatatggtgcttagtcaccatggccgctttgaatatggttcacccaaattgccggcattgctagaagcggaattattgcaccgaattgatgatttagatgctgcaatttatgcagtaacgaatgccctgcagcatacgcctaaaggcgagttcaccgagccactactgagtcaagatggcaagcgatattatcgaccgatgcacgattcagcgctagataacgcaaaacatttagaataagaaataagcatcactgcagttgatttgcagggatgcttattttgttgaaaaattgaactagagttttattataatttcatagtataataaatctaatttataggggagtaaaaaggatggatattgctgaaattactaaaatgattgaggcggttaaacaaataatagaaaagaatgattacattgatttgccgctatttcagaattctagtcaattaaggttaaaaggaaataattataattttatacttgatttgaatagaaaaggacatagacgtcctaaatgtacttttctattaagggaaaagagaaataaggaacagccattagttagagtagatattattggacgtcctcatcaaaatcctgttggagactttaaatggtcaaataaagtcattccttgtcctcatttgcatagagcggattttccaaaatatggtacatatgtagctgtaccacttttggaaaagaatgaaaattttcaattgagtcagaatgatttaaataacttgtgtgaatgcttgaagaagacattaaagtttttgaatgttgataatataaattcatataattttcgagaacaggaaagtttattttaaagaaaggggggagaacagttaaatatgtttgatgtagagaaaatgaagaaaatatattttgactggatagataaaaagattcaatttgtcccttctaaaaatcaggattatatgactatcactacaccttttttagatatgtacaatgattatatagaattagtgattgcacaaggaaatacatcaaaatatataattagtgatgatgggtatactattaatgagttagggttattagatattaatttaaacagaaaatctaaacgtagggactactttcaatcgattttgattaattttggtgtgaaaaatcagaataatgaattagtaattgaatttgatgacttagcccaatttccagatgcacaaaataggttaactcaatgtatgttgcaagcttttgatttattacagacttctaaaaatagtgttattaagtattttaaagaagatgtaacaaattattttattgataataatattccagtaggagaagatttgagtttactaggaaaaagcggacggaattctaagtttgatattgtggttggacgtacaagaaaaaaaccgcaacaagctattaaggtggtgaatacgcctattaattctaatatagctaaccctttatttagaattattgatgtacgagaaagccaacctaaaacagaattttcagttattgcgaacaatattaatagtcctgtttctagtgattttaagtctgcctttaagaactataatattcctgtttattcttggtcagaaagagagcaatggctttccaaatttaaattggcaatgtgatagttgattaaaggtgttgagctgaaattgtaaataatattagttctagcattaggcaatatggaacatttagaataagaaataagcatcactgcggttgatttgcagggatgcttattttgttttggtgaaaaattgtgtcaataattttttgaacaaagttattgacaaattagctgaagaataataacatgtttatacaattgaaaagcagagatgtttttggatagattagagacttgtctcctttctatttttttattgataaaaagttcaagaggtatacattgatttcctcttggacttttttgatgcattgaattgctaaagatgttataaaaattagggtagggaataaaaatgaaagcatcaaaaaaattaattttagtatcggcagctacgataatgttgactgtacctgttttagcaaataatcatttgtctaatccagttgttgccgcaagtcaagataatacacaaactactaaattaacgttctatattaaccacaatgcctatgtttacaatcatcaaggtaagcgtaccaagagcaagattaagaagggaaagttactaaaggtgactatattgaagcctaaggcaattactaacccaaatcaaagcaggtatttcttcaataatgtattagctggcaagtatttttcgttaccgacagtaagcatcaagaagacagactttgttaatattggcaaaaataaatatattaagccaggcaacattggtagaatctcgccaggaaaatatcaatatgcggatctgtcaactaaggaaattaaggtaattaccaaaaagactgctccagtaactaatcaaatagggatgccaattgctgctccaattaagaagggaactaagcttacagttgatcagaactattatcataatgttgacggcgctgatgattatttgagtagtctggaatattatcggattaaaggtactgataagtgggtcaacctacctgctatcaaaaagtcaactcggattatgccaaataattttgcattagctgcatctactgaagataattatgtcattgccggtaactcaacgtatctctataatattgacggtgaaatcgttgataagagttatttattgattccagatgttaatgttggcgttgatcgagctctttatatttggaacaagcaaactaaacaagctgatctatattatcatcttacggctaacaaaaaattggtctgggttccagctcttgatggaacaggcaagactggtactacgattaccagcaacggctcatatgctcaccaaactaaagatacagcaaatacttttgttaaagctagtgatgtgacaagtcaaaatccagttgcattaaaagttgataatacaccgagcgaagcacaagcagatgcaagtcaggccactgctagtgactatggtgagttgcaagccttagttgatcgagcaggtcaaattaaaaaatcgactttatatcgtttgactgaaaaagcacagcaagaaagatatgatttggccgttgataacgcacaaaagttattgactaacaagaatacttctattgcggcagttaagcaggctagttggcaaattaaatacgatcaaagtaaattagacggacaaaaagtttgggttaaaaacatgaataaactaactaaggcagaaaagtcttgggtagtttcattggctaattgtgatatccatggtgatttacaaaaagaatatgctggcttttataaaggtaaaattgcggtagtgacttataataaaaagactttcaagagtgaacttgtacgctacttgaagttgtctgattatgctactgataaataaaattaaagagctcaagaatgctttaatgatgaagcatcttgagccttttgatttgtagtaaaaaaatatccaagaccgaaatcttggatactcattggagctggaactgtgcttgatgaggcaactgctagaatggcgattgtttcaggagctagattcgttgttagcccatcttttaacgaaaatactgctaaggaatgcaatctgtatgcggttccttacatgcccggttgctttagtccaacggaaattcaatctgctttaacttatggtgctgacgtagtcaaaatcttcccaggttcaattgctggtaaaggcattatttctgaaattcatggacctttcccatatgttaatgtaatgccaagtggtggtgtatcattaggaaatatgcatgaatggtttgctagtggtgcctatgttgttggtgtaggtggcggattagttggacctgctaaaaatgatgattataaagctgtattgcataatgctcaagcttttcataatgaatttcaaagtattatttatgccaactcagctgctactaggaaggtgccagtgagggcatagtttttttactgggggggaatatgatgcccctattaaaaaaataaattaatgaaataaaaagtgtctgggaaaaaactaagtctcagatcatgaaaaaagaacgttgaatttttgtttcaacgctctttttgtatacttttagctccagccttgatattattaaatcatcacaaaataaaaaaggtggaaactaacatgtacaagaattatatcacaggtcaaactgctttaacacttaatctagattttgccattccggccaatcatttggctaatgtcatcagctggtttgtagattcaattccagaagatgttttagtaggcaagactgctaaaacgggccgcccagcctatcatccagccatgatgctcaaaatactgctttttgcttactccagaagagttttttctggcagaaagattgagttgatgctggaagaaaatctgccaatgatgatcttggctgaccagcaaaagatttcatatcatactatcaataattttagatcaagcagccatgccaatgaactgattaaaaagagctttatctacttcactaacctgttagaagatgaaggcttaatcaatgaaggtgctgcttttatcgatggtactaagattgaagctgatgctaaccgctatacatttgtctggcgcaaagcggttgaaaagtatcatgaaaagctgaaaggccaggcagttgaactttatgatgaattgattactaaagaagtagtcaaagaaatggaaaaagaaaaagttcaaactagtcaggggctaaaggaattagctcaagaaactgaagcagaaattaacaagctgactaaagagattgagcaggaaaacaaagccattcctggcggttcacctcgaaaagccaagcgacgtggactaaaaaagattctgcaccggctaagaaaagattatgtgccaagaatgcaaaaatatgaagaagccgaagagatctttgccggacgcaacagttattccaaaacagatcatgacgccacctttatgcatatgaaggaagaccacatgaaaaatggtcaattaaagcctggctacaatattcaagcagtcacgaccgatcaatatgtagttgattatgccatctttcctaatccgacagatttcaaaactttggagccggttttggatcaaatgaccgtgttggacaagtttgacaaaatcgtcgccgatgctggctatggcagtgaatacaattattcgatgctggaggaaaaatatccagacaagaagtactttattccctacactatgtatgaaaaagaacagaccaaaaagtataagaatgatccaactaagctaatcaactggtactacaatgaaaaagatgattattacattgatcatcatggcgtcagattcaatttcaaatattacagccagcgcaaggatcgttctactggtcaggtccgtgattttaaggtttatgaggcagacgagttccagctaacgccagaattggaacaattggctaaaacagctagcggccgccagcgccaagttcgctataatcctaactggcaatatttaaaagaaaaagcaaaagaagttctccaaagcgaagaaggcagacacatctatggcatgagaaaatatgatgtagagccagttttcggacatttgaagaacgtatttggcatgcgcagaacgcacctgcgaggtaaagagaaggtcgaaaccgatatcggaattgcctttatgatgatgaatttgaacaaatattgtcaaagaaggtggctgaagggccgatttttattgttaaaaattttaaagagaacaaaaaaacgatcaagattcttaaaaaaggaaatcttgatcgtttttattcatctggaagctagttttttcccagacactttgattaactaaatatatttgttacttagtagttgaaacgtatgatgataatacatccttcaagtcgctatccttgattgaaacgtcagccttcttcaaaacagtagcaataacgtctttcatagtagcttggtcttgagccattgatgcgtaaatttggtcatcgatagccttcttgtggtcagcaaacttacccttagctgggtggctgatcatcttgattacgtggtaaccagattgtgacttaactggagttgaagtaacttcaccagtcttaagcttgaatgctgcagtcttgaatgagctgtctaaagtagtgtcagttgagtcgaatgatggcaacttaccagccttgttcttagtagcagtatcaagtgagtacttcttagctaaaaccttgaagctcttgccatctttcaattgcttgatgatgctttgagcagttgacttcttagcaaccaagatgtgttgaacagttaccttaggttgatagctcttccaagcttgttgttcttgcttcttagtaactttcttaatgtgcttcaatgcttgttcagaaagaaggttagtcttaatgttttgcttgaagcttgaagcagtcataccattttgttgtaaaacagcactaaattgtgagccgtattgcttcttgtagttgttgtattgcttgtcgactttcttttgagatacgtacttgccgtattgttgttccaaagcgcgattgatgatcatgttagccaaagttgacttaccggcttgtgacttcttcatttcatcatagtattgttcttgagtaatcttgccacccttgtatgaagcaacagtagctttagtgccgctattagaacaagcagcagttgataatgcaacgccagctacagctacgactgcagcaatttttttcatataactcttcataaaaataatatctccacatccttaaataagtaactgttcattaatataccataaaaaagggcgtttcgttttcaaattacgaattttcacagaaaaatcaaattttctttattttttcttagttctttgtgtcttgtgagttagtatctggcacgatgttttccaaatcttggttcaatttatcgctctttttttctatgcggttaacgataggttgaatatggtcggaataatgttcaacactatcattaatatcactaattgtacgttcagctgttggcatttgttcatttaattcttgactagcctttttagctttttgcaaggcagaattaaagcgttggctttcatgtttaattgcttcgaactcatcttttaatggcttgcctgggcgattaccattgctatctttcatacaggaaaaaactagcccagctgttgcaccaaaaactgtgcctaataagaaatgtttcatttttaacctctaaaattgtgccttaattttgttagcaacttcgttgtatttagcttcatcgtatttgtcagcgttgttgcgggtcatcagcttcaagccatcgccttcaaaacgaggaatgaagtgaatgtgtgagtgcataactacttgatttgcggccttaccattattagtagtaatgttcattgcagtaacattagggaaggctgccttaattgcattagcaatttcaggaatatattgtaaatagcgttgtgcgtcttccttggtgtagtcaaacaagttaacgatgtgcttttttggcaccattaaggtgtggcctgggttaacttgagaaatatctaagaaggccttaacatcgtcattttcaaaaacggtatagctaggaatttcaccgcggataattttgcagaataaacaatctttgtctaaattttccataataaaacctcatatccttgtactttagtttactattaaatccatgctatcataataaaggtataaattcagtaaagaaagataggaaaaatgacattaaaaattgaacatttaacgggaggctacacgggtgtcccggttattaaagatattaatttggaaattaagccgggtgaggcactaggcttgattgggctaaacggcgcggggaagtcaactacgattaaacatattttgggtttacttcgcccgcaaaagggtaagatcagcttgaacgatgttgtattgacgcagcaaccaactaagtttaagcgtgaagtagcttatattccagaaacaccgattttgtatccggaattgactttaaaggaacatttggagctaaccatgttgagttaccacttggatgaaaataaagcatggaaacgcgcacatgagctgcttaagatgttcagacttgatgacaagctagaatggctgccgattcacttctctaaggggatgcggcaaaaagtaatgattgtctctgcctttttagcagatactagtttgcttgtaattgatgaaccatttactggccttgatcctttggcagttgctaacttaatcgatttaataaaaaaagcaattgctgacaaaaagatggtcttaatgactactcacgttttagctgatgcacagcaagcgatttcgaattatgctgtgttaaaccgcggcacgatcgaagttgtggggagtttgcaagaaattcgtcagcactatggccttaagccagatgatccttttgacaagttataccttgctttgaatagagaggataatggcaatgcgtgagttagcgaatagaaggttgagcgagaatcttaaacaatcagtaaaatatttgacgctggtgtttaatgacttctttattttagcgttgatctttttgtttggggcgctgatgttctggtatgcgcaagctatgcgcgtaattcccaataatctgtggttctataagccacttgtcggctttatcatgtggttgccattattagctggtcgattagttaccttattaaaagaggccgacatgcaatttctgtttacgcaagatgaacaaatgggtgaatatctgaagccgatgattcgttacagtatggtgctgccaacaattctgattgttttgcttggcggaattctgtttccgtttgcgacggtaaaagctggaatcccagtttggtcatatgtaatcctgattatcagcactgttttattaaaattgtgtatgttgctgattgaaaaagagagtttgtacttctactacaattatccgcaatggatattattagtggtaactctggcagctttgttgattggctcactaggatcatttatttatccaattgaagttgtagtattaatggtaattacacattttggtactaaaaaagaaaagggcgtctttaactggcgctatgcgattaaaactgaacaagctagaaaagatcgcgtttattcaatcttcagtatgtttaccgatgtggcagaaaagcaagttacaatcaaacgcagaagatacctcgactttcttttaccaaaatcattggctaaggaaaatcctaatttgttcttgtatcggagatcacttttgcgtaatccagaatacttgaatttattagtcagaatgactgtgtttgcaatcttggtatcgtggttagtgcaagattggcgttgggcactaggcctttcatgcttggtaatctttttaacggtctatcaattattgccaatggcaacagagtttgaccgcaacttcatgtaccgcgtttacccaattgaacggcaaaatcgtggcagggacttggtaaaggtgttgacaatgggcttgtttattcaatggctcttgattagtgtctgctggttaattgtgctaccaattaatgttaacttgtttgaagcgatggcaattttacttggtttcactatgattgtaactgccacttacttgccaggcagagttaaaaaaatgaatcaaaaaaattttggaattagataggaatagagaatgagattaagaaataaaccttgggctgttaagcttgtaaacgaccatccagaaagtgttttgcaaaatcctgatcctgaaaaaaggatcgactggactgaacgatttggtaatgatcatcccatcgaaattgaagtaggttctggtaaggggcatttcattactacgttagctgaacaaaatcctgataaaaattatgttgcattagaattgcaaactacggctgcggggattatcttgcgaacaaagttggaaaagggcttggataatttacaaatcttacgcggggatgcggctgacatcaactgcttctttccagcaaatagcaccaatgttatctacttgaattttagcgatccatggccaaagactcgtcatgaaaagcgtcgtttgacttacaagagttttttgagcaagtatgaacaagttctgaagccagaaggacatattgaatttaaaaccgacaatgcgggcttgtatgcttactctgttcagagcttgaataattatggaatgaagtttgattttgtttcagttgatcttcatcatgaaaagccagagattgtggaaaagaatattgaaacagaatacgagcataaatttgcagctaagggtaatccaatttatgctttgcacgctcattttgaggatgaatagtttgaagcgtctagagttacagcagatgaactctaggccttttttaatgctttattggataaaatcttgctactagctcatcgctttagttattttgttttagaatagaactgtaagatttcagattattggagggaaaattatggaagataaaccttattatgaataagaatatcacgaacctgaaactgatattcctagaccaacttttggacaagcattcaaacttttgtttactgcaccatttaagtggaatgcacgtagtactcgtcgtggattttggtatgcctatgtttgggcaattattttgctagtcattttagcagcatgttcagctacggcatattcaattgatggcattgcttattcaagtaatgaattcttcttattaacgcacgtttcaactggtacacttattattcaaataattatctatctactgattatttggatcttattaggcttacttggctttaccataagaagattgcatgatactgaccacaccggttggtggtactggatctcggttattccatttgggtatttgtttttactttacttcatggttttgccaactgttgaaaaaccagttcgttggggcagttatctatttaaagaaaagaaataattgtaagactcaatttctagctttttagttaaagaatggttataataatatcaacttataaaaagtaagaaatacatgaggtatgaaaaatggaaaagattaaagaattaactgaagatcaattaaaggaaattactaaagaaggacgtactgtgcttgaattctcagctgattggtgcccagactgcaagtttcttgctccatttatgcctgaaattgaaaaagatttttctgatgcaaaattctacgaaattgaccgcgacggttcaattgacatagcaaaaaaattaatgattatgggaattccttcatttgttgtctaccaagatggcaaagaaattggtagactagtaaataaggaccgtaaaactaaagatgaagtggaaaactttttacgatcacttgactaatagaggagaataaaaaagcatgattactagtactaataaagaagcttatcctaacactttgatcgttatcttaggtcacgatgaaggccgtagctcatttgaggaaaaagaagacgttactcgcgtaactaacgatgaaggcaagaccattggttacaacttcttcaacgttgataagttagttgactttgataagttaccaaatggtccagttaagttgtcagacgatgagcttgttgcactgaacaagaagcttgatgaagttggttttactgacaagttagcatatggcaagccaactttagtttatggctacgttaagacttgtgaaccacaccctgattcagatcacttgcacgtaactactgttgaggttgctgatggtgaagaacaccaaatcgtttgtggtgcaccaaatatcgctcaaggtcaaaaagtagttgttgcacttccaggtactttaatgccaaatggtgcacaaatttggccaggtgaattgcgcggtgttgattcatacggcatgatttgttcagctcgtgaattaggtttgccacacgcaccacaaaagcgcgggatcatggttgttcctgatagcttcgaagttggtgcagaatttgaaccaactaagtgtgatgaactgatcgctagtggtgaaattactttatagttttaaataaattagaaaaattccttagttacgaaaactaaggagtttttttgttagctcagccaccacttaccatttggagcaagggtatataagccaagttctttcgatattaatcggttgtctagatctttactacaagtatagtaaacgtatttaatgaaatcaccattgccattatagcgttcttcataatcactcaaatatagctgatgatttttcatgaacagtggaatctgatcttcagtataggtgattgcaaatttgtctggaaaataccctttaactgtgcagcctttggtatctgtcccttgatcattatcactgactaattgcacactgtcgtcgctggaaattaaacgtaaattatgcaaattaacagcatttaacgaacaagtgaaaataatttttgcttctttttctggttgatatttaaaaatatgcaattcatttgatttagtatttacttgagtaaaatagaaaaagccatcattgaaaattggttcgccgtagcacacgttaggttggactgaaaatggtgaaaaagccttaccgatcttttgatcaaagaagattaagcgattaccaggataaatgcgagtttgccaataatcgtcacgcagatcttcaaattgtacataatcagaaatcgttacccaatattgatcttgaccggctaatggtctttgatcacaccaataaggcaagatgaaactatcattagatagcaaaatgatatttccttgcatgtcgcttagaatattatcatcgaagtccttgatgataattcgatcagggacatgttcatagtcattatctgaataaaaatcgctatcttgttcaaaatagagtttagtgtcattaatgaagagcaaagtttgatctggttcgttaactactgaagatttttgtgggtaataaaagtcgatgttatcatcaaaagaagcaatccagacatgtgccttatcgtaaaccaatgataaattataagtgtgtaaaccagtaagtggcatttgatggatgatttcaggttcttgtccaggtaaatacttaaataaggttagttgatcttgtttaagtaatgcatgtagaaaatagaaataaccatattgatagatcacgctaaagaaaaattgattttctttacttgaaattggttcaaatttttgtccagtttgaaagtcaaagaagactaactgattgcctggaaagggatgcttttgccagtatttttcagtagttaaatcgtaaatatcgattgcactatcctgacaatcgacaccgtagcgtgattgtccttgaatgattgttaaatcattgccggttacaggagaaaatttatcgaatttcattgatgcgtacctttctgtaatttttcaaaattatatcacagaaacaatggtaaaatagttaacgaataaaaacgttgaaatttcgagggacaaataatgttagataaaaataaacaaatttggttcattggtatcaaaggtacagggatggcatcccttgccttgcttttacatgacttaggctatgatgtagcaggtagtgacattgaaaaatatacctttacgcaggtgccacttgaaaatgtgggcattgatgttaaaaactttaacccggataacatcaagagtaatgatgaacaagtaattgttaaagggaatgcttttaaagaagataacccagaagttaaagcttgtttggacaaagatgtcaaatggcaatcttacccagatactgttgaagaaattgtccaaatgcatacttcaattggtatttcaggtactcatggcaagacttcaactactagtctcttatcacatgtattaggtgaagttgccccaacttcttacttaatcggcgatggtcgcggcaaaggtgtggcagattcgcgtttctttgtttatgaagctgatgaatatcgtcgtcactttttggcatatcatccagattaccaaatcatgactaatattgactttgatcatccagattactttaaagaccaagctgattacaccagtgcttttcaatcagcagctgatcaaactaagaaggcgctctttgtttggggcgatgacaagcgtcttcagagtcttaagaccgatattcccaaatacacttatggctttaacgatactgatgacttccaggctactcaaattcagaagtccactactggttctaagttccatgttttagcacatggtaaagatttaggtgaatttgaaattcacttatttggtgatcacagcatcttgaactcaactgctgttattgcggttgcttacactgaaaaagtgccgatggatgacattcgtgaagggatgttgacctttaagggtgctaagcggagatttagtgaaaaagactttggcgatattgcagtaatcgatgattatgctcaccacccaaccgaaatgcgtgcaactattcaagctgctcgtcaaaagttcccagataaaaagttggttgttgttttccaaccacatactttctcaagaactaagaagtatcaaaaagacttcgaagaaatcttgcgtgacgttgataaagcttacgtaactccaatctatgcttcagctcgtgaagctaacggtgatatttcaagtgaagacttggttaagaatattcctggctcagaagtaattgacttagacaatattgctgacttgactaagaataagaattcagtcattgtctttatgggtgcaggtgatattcctaaatatgaagatgcttttgaaaagttgctttaattgaaagataagcatgaaaaaaactgttctcaataagagagcagtttttattttggctaatctttgattttatctttaagatccatactcttttcgtaaatgaagtaaccaatgatacaagtgattacatcactgactgcttgagcccaaacaataccatgataaccaaatacatctttcatgatttctagtgcgatgaaatagacaacgccttggcgaacgatggccatgataaacgctgcccatgcattaccaactgattggaagacggtagtgtaaactaaaatgataccaacgattggtgtggtaataatagtggcaattaacatataactaccagcgttgatgatatctggttgattcataaatagagcggtgactggacgagcaaataaaattaataatccgcctgaaattacagcataaacaatttgcacaagaatatcgaagtttagaattttctttaatcgtttccagtttttagcaccatagttgtaaccaattaaaggttgtgaaccaaaggcaaaaccaacgattaccaagataacgatactgtaaatcttttgggtgattcccattgcggcaactttgtttgcaccgtatagggctaaagatgagttaagaagtgccataccaaagctttgagcgaagttggtgattgaaccggggatgccgattgctacgatatctttgattgttttgccgctaattttgctatattttagctttaatttgatgtagtcagttttgtataaaacgtagtaaatgagaatagcatcagtgactagataacctgtaacgttggcaatcccaacaccgattgcacccattttgaaaacaaacaagaaaataggatcaaggatgatagctaaaatggttcccgtcattgtaggcaaccattgcttgggtagctaaaccttctgttctgattaagttctgcggaatgattgagaagataattggcgcagcaccaattgatattacacgataaaaatcggcagcatcttgataggtggcagcttttgctcctaaaagatgaaggatcggattttccaaaattagtaaaatggctgttagtattaaaccagtaacaaatccaccgatcatacaaaaactgcttacacgtttacttaattgataatttctttcaccgaatagccgtgaaattagtgaagatccaccgagcccaaaaatgtcagaaacagcgattaaaaaagtaaaaagtggagcaccaatcgtaattcctgctactagatttgtatcacccgttttggcaacaaacatcgtgtctgccaagttgtagatcatggtagtgatcatccctaagacgaccggtaatgctagcttaaagtagacctttttaatcggcgctttagcaaataattcatccataaattttcccccacattgaaaaaagcgacctagaaagatactttgaggtaaacctcactattctaggtcgctacgttatatcatttatttaattttagcatattgtgttaatttgtgaggtgattatctaaattaaagttaccttgaaattcatcagtagtgctttcttgatccataccatattcagcatcgtcgccccagtaaatgtattgtgcatttttgcccttggtaccggcaattctgaagtaaagtgcagcgctgtcgcctttaccagtggtcttggtggcatctaccttaactttttgaccaatcttgagcaacttgctagttgacttgagcttattatttaaaacgtggatcttgtttaaaatagtggctgtagtggtgctagaagcttggtaaagagtgttgccgttaacaaaaccaacatttgaagcataaatataagcaccgttgcctaaagcataaaatggcttgcccttgatagtggttgtattcaaacttctcttcttagatccgctaagatttgcaaagtagaaaaatacgtcattcttagttgtggcgtggattttagctggcgttttaactagcatatatttaggaataagcgacataccgttgaaagtagtgcggtgaccgtttttatcataaatgcgagagttggaactcaagattaaaacattttgcccatccattgagctaacattcaaagatttgatgtagcgttttttaccgatgttaacgtaagaagcggtagtgtagtggtagttcttagaagtttttgcatctacttttttaccttggatcaggataggtttgccataatatttaaaacttgagcctgatttaaccgttgaagcaacagtcatcttcttgccattgactttttgggtagtggtagtggcattgcctttgctgttgaagacttgaactgtgccgttaaaggatttcttgagagtaactttacctttttgtgattgcgtagctgcttgaactgtgtgaacaggttgattgataatggcagctgctggtgcaacactgattaataaagctgctgcgatagttgctaattttttagtagtcatattttgtctgctatataaaacatggaaatatgtagaagaatacgaatttcctacatatcagaaagatatatttttcctttctttgtttcatttactgtcgtcttcactagtattctgatattccaaataggagtaatcacattgactagctcttacagcttaaggacctagcaagccctgtttattttctttattttgccaaagctaaaagatttaaaaccgcattttcatctcgatcattcttgtagccacactcataacagacatactcattatgtttggtaccatgctttttattgccctgcaaagtgatcttttcctcgccttttttgacataaccgcacgcagcacatctttgagttgatgggtatgttttatcagccgagattaattatttgccataccaatcacacttataagttagtattcgtctaaacttgctaaaaagtgatctctacattccttttgaagctacatgcgtcatcatcatttctttgactgccaaatcttcaattacaatttgatcgtaattattaacaagcttagtagtaaatttttgtaatagatcgttttgaatattagctgctttgcgataatctctttgcagtttggttctcactgcaaagtaattatttgattttgtagctaacttaccgttaacttctcttttacgtgccagcattctttgataatgcttaatacgcttataaagcttttgcaatttagcaggcaaaatattgatttgcccctcggtatagttaaagtggccaacattgacatcaactgctgtcttttgctgggttttagcttttagttcaatttcttcttcataaggaagagccgcataataattatctttttctttgaagacacttactactttgacttcatccatctttagagcttcatagcttcatagcttcatagcttcatagctttttaaatcaaaccaaggctcttttgaaatgcttcttgggcgatcaaggcgaagcttaccattaacgatcttagctctatcagttttaaagccttgtctgggagctttcttagatttaaaactaggtattccccaatcaggttgtgacttatcaaagaagttcttccaagcattagctaagtctttaatcgctaattgtaaacatctggcagacaaatcatattgccagtcggctttatttgcgactagttcatcacggactctgcgttcgttaggactgggattatctttttggtttaatgtatgagcttcatacattaattgccaagtttctaagcctttattccagcagtatcgacgatagtcgcatagagcatcaagatgcttttgcatggtcttattaacttttagcttaactacttgtgtcttgatcgtcatttaagtactcgcctctaatctttttcttgtactttcttaagccatatagtctgcatgaaaacacatgaattatacttatcagatcatcaaccagttctttatcaggactagtgtcaatattattcaaaacaattatttcagtcccatgctttttacataggttttcaaaccaatcatagccaaaacggataaatctatctttataagtaatataaattttatctattttgttgttcattacttcgtctagaagattattccatttttgccgtttatagtttaagccgctgccaatatcgcttatttcttcgtctaatacgataccttgtgcgttagcgtattgtcgaatatggcttaattgatcttttaagtcatctttttgaccataagttgatactctggcataagcaacttgttttttatttgagcttagattatttttgctcaaatattgatatatttgatcttctgtatagaatctgcgattagtaggagagcgcttagctttaagaataccctttcgatcccatgtttggagggttctagtggttattcctaaacgatcagcgacatctttaggttttaaaattgtataatattcacttccatgtttaaatttctaatgaatattatggcaaatatttctattatattctataaatttccatattttgttaacagttaatcagctcctttgtaataatcccttaagttgattttagcacttatgagactataaaaataacctcgaaactcaaacgttttcggggttatttgattttattcacttaagtacttaggatcaataaatttattgatcacgttgttaaccttctttgaattatcgtacttgcggataatgttcaagaagtcttgtgcagttgcttgcttcaagtagtaagtttgatagtaatcgtgtaaagcatcgaagaacttggtttcgcccatggcaacctttaaaacagcagggaagtccatcccaagttcgtaagccatgtcttcagtgtcaacgccctttggtggattattaacagggtagttgatgtagttggccttttgattcttattaatgaattggttagcattttcttttaagatcttgttagcacgcttgacgttcttacgagtatagaacttgctgtgcatcagtttagcacagtaggccttattcttagtgtaggtcaaatcgtaaacgccattttcaaggaggttggtaagaccttcgtcaagccaaggttccatgtattcgtcgctgccgacagtgccgtagaaccattggtgaccaacttcgtgagaaacatcttcagttaattcattatatctatcaagtgggtgcttcttttgtaaaaagccgctggcatcgatcatgatcaagccaggatattccatcccacaggtatctttgccaagcaagcctttagtaatatcgatttctttgtaaggatatttgccgatctttttggtaaaaatgtgaaaactgtcttgggcagtcatcaaagcaagcttgttgtattgcttgctgtttttgcttgcaaggtagtagtcgttgattcttacgccgtttgcataagcgtggtcaaccttgaacttgttggaagcagcgattgcgaactcacgcatgttgttggcggtaattgtagttttgccatttttggttgtgctttgaccagaagcggcaactttgtagctctttggtgcgaagaagctaacgtggaaattgcttacagcactgttgcggttttcaccagcatcgtagtatgggtgataattccacttaccgtttcacggtcatgttgtaatttgttgccttgatcgtaagatcagccgcagcttgaacttttgagttgaagttaaataatgccgtaatggttactgcactcgacaataaaagtgttgttcttcttttcataattttccatccaagaaaaatttactctaaattacttaaacttcccacatcaaataagctggcaattctttgatattgcttagctttgggcttctatactatttttgctagttttctttaacaatttttgcatgtatttgggtaaacgattgataaagtcagccgtgaattctgctatttgtgcttcactggcatgaaagactttttcaacgctagccaccattgcttttgtgattagctgaagtgaatgactgaatgtaatatccgccagctcatcaatcatgcaatagaaaagctcacctaaggttcgctcatcttcgtcgtcccgcttggctactgacatgagcatatagcgggtaaagactatagccacatgagcagtcaaggcatcgtaggacagaccatgatattccgtgcttagttttaggtagcttttgcaggttttgaaaaaaacttcaatatcccagcgtttgccataattgcgaatgacttcatcttcgctaagcgacatgtcggtacaaataatagccagccactctttacgattggcacggtttctaacgcaaattatccgagcgtcaattttagcaccgtctttgtcttggcggccaaccttgactggaattgacaacagatagcgcgaacgcccgcgtcgctttttacagctacgataaatctgtttgatgtttttgcgttctccttcaaattcatatttgattttggagctaactttaaccatggcaattacatccagcttcctttgcttgagctggacgatttgatgtggatttgagaaccagctgtcaaacagcacgtacttggcttgatgacctgctttcatagcttggtcgattaaattaaccatcacgtctgtgcctttagtccgggcaagcatgcgtcttttgccagcaatggtgcgctgatcacagactttgttttcgccaatcatattctgtagcttgtgagaggacagcaacaccgaattgattggcatgaaagaagctccatcagtccagcccagggtcatcatgcgaaaacctttcttgtaagtcattgatacatggtcaaaaactttggcgactaattctgttttcttgaagccggtcctagagaagtaggaatcatcgacaacaaagcaatcagcccgtttttctgaagtcaaagatcgcaagtgattattaatgatttgcgcagaaagcagtgtggtgaagtggagccaattgacgtggacgttgcgcataaatcggtaataagaatttttagaaaagctttctttaaaatgatccgttttcagctgcatatataagctgcggtcacgaaagacattgcttaaaacgtaaagaaacaagctgaacaggctaatgcctttttccttgcggaagccacattttctcaacagcttgatcacctgaaacttcttgatgaagctgatgattgagtttgaaaatagttgttcatttttttggtcaggagatggtaaaatagacattggcacaagcctttcatgcatagaattatcgtttggtcactttaattatagcaatgaaaaggtcatgtgccttttatatttgttaaaaaacgcagaatcacaataaaaggagcgattctgcgtgtgggaagtttaagtaaattattggaaattatcggcataaagtaaatctattttttgatgataggatataatttatgtataagtgaaaatgaatagatataaagaaagaagataaataagaatggttaaaagtattacacctcatttggtttatcacttgaatgggatgcaccatgttgtagcacaagttggtgtagtaaatggtgatcatgtttttgccttgcaacttcttcacagtgcacatgatgtgttggtttatagaaaacatgaaggtttaaccaagaacatcgattatactgatccacacttagtaatgatgggctttggccacacgcaaacctgggtaccagctaatgacaaggatgaatatttcgtaggtgctaaaccaaattcaggcaactggactactcaaattgcacgagtaaagtacccaagacttttaccagaaagatatacttcaaatacacaacttccacgtttgtcacacttgaatcacgtaaccgacgttccttatgatggtcatgatcacttgcacagagtagaagcttcagtttcaccaaatggcaagtatttcatgattgcctcaatttgggatgatggttcaggtcactttggtttgtttgacttaaatgaagtaaaccaaaagttgaatgaaaatggcactaagaacacgccaatcactgatttacattgcttgagtgctttccacatcgacaacttcgataatccaagtgttgctccagatgaagaaatgctacaaatgattgattcagttcaaggctatgctattgatgatgacaagaatatctatatttctaaccaattgtcaccaaagattaaccatgaaactggtgaagtaactacttggtcacgtaagattgttaagttcccatggggtgaaacaaacagtgataactggcaagtagctatggttgatggtattgatttaccagatcgttacagtgaaatggaaagtatccatgttaatgccgcaaatgatatttacttaactgtggcttaccaccaaaagtacattaagggtggagaatataagttaagaactttggaaaaccaaattttccatattactgatttgtagaataataaaaatttaaccaagtaaaaaagtgctgatgtgtctttgcttatgaagactatcagcactttttattcatattaatcagtaattctttctttaccaacagcacgttgttcggaaggattataacctaactcttcaatttcttgtcttttttctttgttattgatttgagaaagaatatcccaaaagttagacttatttttcttaatttttgaatttctgttagttttcattgttgttgccttcattttcactttctataaatataagtatactctgaaaaccaaatctatttttagctattaagatcgattaattcaaaatgaaatattttacaaaaatatatgcaatttatatgtaaatgatatacaatagtatcaaattcagaaaggagtaaaaattatggcagaaaaaacaacaggactttatgtcagaatgaatccagaaaagaaggaaaaggcagaagctattctgaaaaagctggggttaaattcagctacggcaattaacatgttctatgatcagattattcttcataatggtattcctttcagagtagagattccgaatgcatgggataatttagatcaaatgaataagtatgaatacgccaaactgcttggcgagcgcctgaacacattgagcggaaggaaagatttgcttggagatgtcgccaagaggcttgatgcggaaaagaatgaaaagaaagacaactaagttttgaggtaaaaattatgatggcaagaattattattggcattattgttgttttagttattgtgtatgtttgttgtggttttagaatcgttccacaaaataatgaaggtttggttgaaaccttgggtaagtattctaagacagtaaaagctggatttatctttgtctggccacttttccaaagaattcgcaaagttccattagcacttcaaccacttgaaatttctaagtactcaatcattaccaaagataacgctgaaatttccactagtttaactttgaactacttggtcactgattcataccgttacttttacaacaacaccgactcagttgaatcaatggtgcaattaatccgtggtcacttgcgtgacattattggtcgtatggatttgaacgcagcccttggctcaactaaggaaattaacgatcaacttttcactgcaactggtgacctgactgatatctacggtatcaaggtcgttcgtgtcaacgttgatgaacttttaccaagtgctgaaattcaacgtgccatggacaaacaacttactgccgaccgtgaaaagactgccgcaattgctaaggccgaaggtgaagctcgtaccattgaaatgaccactaaggctaagaacgatgctttggttgctaccgctaaggccaacgctgaagctgttaagacgcaggctgatgccgatgcttatcgtgtacaaaagatgcaagaagctttgtcaaaggccggcgaaggatacttcagaaaccagagtttagacagcttcaaccaattagctcaaggtcctaacaacttaatcgtggttggcaaggatgaaatgactgacttgggtaaggttcccgctttgaaaaaggtgtgggatgcaagcgacgataagaaagatgaataaaaattagctcaattctcaaatgaggattgagcttttttatacttttaacgtataccagcatcaatattaagtaattttcacactctcttgctcgccttatacttgtagtaacaattgagaacaagaggggaaagaaaattatgtttggtcgtacttattcagatttaggtccagttgttggacaaattaatggtgaagatattcgcgcaaatcaattagaaagacgtggctatgattgggaaaatggttatggcactccatccgatggccaagatactaatcgtgatggtcaaccagttagaaaattaactaaagatgccaaaagcattattatcttttggtcgtgttccggttcaactaagttgctcgcaagtaaagttgcgtgtgaaaccggtgctgatattttagaaattactttaagaaatccttatccagcaaattaccgtaaaacgctcaatcgcgctaactgtgaaagaattcaaaatgattcatcagagcttgagatgcagttacccgatttgagtcaatatgacacaatttacttaggctatcaaacttggacaatgactttgagtcagccaatgaaggcattcctacttgaatatggtggtgaattttctaacaaggagattgcgccattcctttctgaaggtggatatggttcgggtgatagtactgaattgatccgtgagtttattgcacgtgatggtggtaaaaataaaaaggtcgattggacatttgttggtccagaaaatgtcctttgtgctggcattactgataaatttgaaaaggcaggacaaaagattttcggccctaaccaaagaacggcacaattagaaggttcaaaggattatgctctgcgctttatgaacaaatatgatgttccaactgctcgccatgaaactttcaccagcgctgaaacctgtattgccgggttaaaggattttgcatatccggtggtgatcaaggaagatggtttagctggtggcaagggcgtaaccattgctaagaatcaagacgtcgctgaagaaacgatcagagaaatgtttgcaggtggccaaactgctgtcgtgcttgaagaatgcttggttggtccagaatactcaatgtttgtggctgtttctgaagatcaatttaccattttgccaatggcgcaagaccacaagcgagttggcgatggtgataagggtcctaacaccggcggtatgggatcatattctcctttgccacagttgaaaaaagaagatcgtcaaagaatgatcgatgagatcgtgaagccaacgatgaatggcctggttcaaggcgattatcactattgcggtgttttatacatcggcttgatgatgacagaaaatggcccaaaggtcattgaatataatgtccgcttgggcgatcctgaaactcaagttgttttgcctcgaattaaaaatgattttgccatggtgattgacgcagcggtaaatcatgaaaaattgcctgagattgaagaaaatgataattctatcttgggcgtggttgtctgcagtaaaggctatccagcgcacccggcacctaacgtgaagatcggcaagttgccagaaggtaccaatacctatatcgattatgccaatgtgaaaggcgaattggataatctgataggtgatggtggtcgcttgttcatggtgatttcggaagctgacaatttagtccaggcgcaagataatgtgtactcttatttgagtaagcttgatctgccagattgcttttaccgtcatgatattggtaatcgtgctttgagagattagatgtgtgaagaaagtcccggttggggcttttttagtttggtttaatacgaacacttggtcgtatttgatgggatcaatgataaaattttctccacataagtggaggttttgaggatcagtcgtctaacgggcaagacaggcttagttaataagcaagatatgggtccaattcccgtcgtccttaatatttgaataaagtaaaagctcttagttgtgaaaactaagggctttttcgtttacctaaataatttcctataaaagatctaagtgttcattctgaagatttctaatttcattaggtgtatgaccatatttcggagactgtaaaatagtttgtgtaaggatgaatgattccttaaatttatttctttaaacattagaaaaaggggttcctttctcgtatgattggtttgaacaaaaaaacacatacagaaagaagaactccttcatgaatgattttaccaaagattttgctcaagctctattcaatccagacaaaataaatgatttattgcgcaaagagctacaacaggctgttaataacttgttagaagctgaattgaccgcctttctgggctatgatccctatgccagaaatggctggaatactggcaactctagaaatggtgcttatttccgcaaagttgatacgcaatttggcccaattgaagtgcaagtgccccgggatcgcaacggtcaatttcatcagcacacgctgcctgactacaagcagcactcggatatcttggaaagcatgattatcaagctttactccaagggcgtgaccaccagggaaatagccgatctaattgaaaagatgtatggcagccattacagtccagctcaggtatcaaatatttccaagcagatgattccaaaggttgaggcttaccacaaacgcaagctaagcgacaagtttttctgcgtctatttggatgcgacataccttcctttgcgccgagaaacatttgagcgtgaagcagtctatattgccattggcatcaagcctaatgggcacaaggaggtcattgactactgcattgcacctagcgagaacattgaagtctggacagatatgcttcaaaacatgaaatcccgaggcttaaagcaagttgagctttttctttctgatggtgttgttggcatgaaaacagccttgaccaggacttatcctaaagctcattttcaacgctgtttggttcatgtcatgcgcaatatctgcgctaaagtacgcgtcgacgatcgtgaaaagatcatgaacgaattcaaacaggtgcatcaacagacaaacaaagaagaagccacagctgtcctgcatgacttctataccaaatggggcaaggtttacagccatgttatcagaagcttgaaagacatagaaccagatctgctggtcttttataactatcccaagcagatcagagcttcaatttattcgactaacatgattgaatcatttaacaatgtgatcaagcgcaaagctaagcctaaggcagagtttccaactgaacagtcgcttgatgcttttattggtattcaggcaatgagctacaatgaccgttatttcaatcgaattcataaaggctttggtcaggttcaggacaccttagaatcctactttgattaaataaataattaaaaaatcaatttacgagaaaaatctatttacacaaaagatctaagtgtataattttttacggtaagttgaataaataattaaaaaagcccaagtcctttgaatttggacttgagctcaaacaaaaagaccagtagtctgatgttaagaacaaaaaacacattagaagctggtcttttatgaattcaattgtaactgaaatcgcaaatattataaagtctgaagataattatattaagcgtgaaagaaaaataatctgtttcttcttaaacctgattaaggaaatcatggccttggctttagctaaagttgatgatgaaatgattaccaaggttaaagcacagggctatcagattgataagaagaatgagcgctcaatcaatatggcttttggcgaagttaggtatgtcagaagaagatatgtctgcccaggcaaacaagcaaggtatcccttggatgaattaatgggctttgacaaatacaagcgctacagtattttagcagtcaaaaacatcttagaagtaagcagcgttgccacttatcgcaatactgctctagcagtcaattgcctgtctggctttaatattagccatatgcaggtgggcaatttggtaaaaatggccgggaaaaatattaaagcgggccaagaagcagattcaagatatgatgccgcaggcactaagaaaaaggtcccagttttgtatcttgaaggcgatggcgtggtgatcaaaggcactaaaagccggttggaatttcatcgctatcaggtctgtgaaggcattgtcaatataagcaagaaacgcagaaagcgaatcaatgccaaggaatttgtttctttaagccgacttgatgcgctgaacgaagccaaggagtacctggccaatacttatgatctttctgatactgtaattcttagcaacgccgatggcggtgctggatatgccaaaacagacttcgatgacattgtagggctatgcaagcgtcatgagcatttcttggatgtctttcacctaaataagaaaatcaaagaaaggctatattttgcgcctgacctgcaaggcaagctgatttctgctttggaatacaaatacagctatgacaaagttaaaactatcctaaccactgcagaaagccgactaattgatgaattgaataccgagctcaatcatgattatctggggcgcctaaggaattatattgatcgtcattgggacgatattaagccgtttaagaaacgaaaactgactgtgactaaagccattggctgctgcgagagcaaccaccgcaagtatacctaccgtgttaaggggcaaggcaagaaatggtcaaaatctggagcagaaggcatgcttaggatcttaagctgcatcaagaatcgagagctggaattttggcttagcagcgagtttgaagattcagaaataactgtattgactgaacaggaattaaaagcagcggcccgtgacagcttaaagaagcgtcatgaagttcatttaggcatccagcatggcgcattaaccgcacaggtagctggcaatagttatttaagcaagctaagcagaaatttaagtcatataaatatttaagaaattaaggttagactaatggtttaaaggctaccgcaaaaacattgacacttaccaaaagatttgacagtttcaatattctggattaatctgtattttgcttataataaaagcaatggtaaatatttatttttagttaatgaaaggcccaaaaaatatgttatctaaaagaaattatcaagaacgtcttcggaagatggcaccaaaaaaagagcgtttttctattagaaagttttctgttggagcagcgtctgttttaattggatttactttcgtgagtatggctggaagtcacaaagttcaagctgcagatgtagctgataaatctgtagtagttgacactttcaataaagataagagtcaagagctaacagaaaataagactattgaaatgccaaaagcagaaaaaacggctgttagttctgtaaaggtacaagaaaataaagacgcagtacaacctaagactgttaataatgaaaatgtattaaatgtatcaaaagcacagtctcaatctaatgaagctgtaactaagaatgcagcagaatcaaaagtagcagcactacgtgcttttagagcagcacctcaagctactcaatcacaagatgccaatgatttccaaagcttagttaatgccatgaataatagtagcattggaactattaatattaccaatgatattactattaccggtaaagttaacggccttactacttttggtataagtgatataaacaagcactacctttatctgcagtctaaaggttcagctcgtgacttaacaattaatggtaatggtcacactatcaactttgccggttacagtattgctttacaagacgagaactaccacaatgctgctggcccttggaacattactttaaaggatatgacgattgagggtagtaagtatggctattcaccaatttcattctatagcagcaagactaatactgaaaatagtaaattaatttttgatggtgtcactgctaacttgaatgatcgtccattagttgacaagtatggtgaaaacttaccagttcactttgccggtgataacaacattatgcttaataatatgtcaattggttacaatctagtaactggtaagactgtaaaatttgactctggtaatactacttttaatgttggtggtaaagtaactggaaatgctattaatcctgacaactgggtaattcgttcaactgaaaatgctagtaatagtgaaaatccttcaactttaattaatgaaggtgcaactgttactattaatgctaaatcagacgacttacgtggtatttatgctgggcgtcaactaacagctggtcagccaatctatggcgttactgttattaatggtactttgaatgccaacatggcagctggtcactcaactgcaatttggtcacatgatcttgaaattggtaaaaagggtaatgtaactatccataccaagcaaacaaatcaggctgatggtgttgaaaatggtacttctaattcagtaactaattataatggtacccactatgctccaatttcattaggtgttggtccaataagtagtgttgccagtccattatctaggcaaactgccagcttaattaacaatggtagtttgactattatacgtgatactactgaaaggacattggtaccattaatttcaatgggtgacggtggtttaagtactaataccacgttgaaatttggggttggtgccggtgctactctcgatttacaagacaatgcaggtacatttcaatatggtactgaacctaacacaccattgaatggtttgattactctgtggggtacgagtggtacagatttattggaatttcttaccccagcatatgtcaacttacaacgtactggtaatattcgtggtacattgattagaatggaaggtgtctacaacagtactactgttaatggaccaacaccagtggctcaatgggatcaaggtaataagactactattcctaatgatgtttggtatgtaagatacctgatatctgcgaaccaatggggtaataactctggtcaatttatgagtaaagatcaacatcctaatactgtcgttgcgcataaaggtgttgatacactttataactctaatgctactgtcttaatgtctaagaaccaaggcgctgataaatacgaaaacggtacaatgccaactgaagtacaacaggcactgcacttgaacagcttcttaaacaactttaacttgtggcgtccacaaagaatggctatgggtagcaagttgaatgatagtcctgacgttaagattgatgattttgataagtatcacccagaagtgcaaacgattgatggaactactcgtcaaacattaagtgatcttgatgctaataagggacttaaagatttaattggtcctgatgaacaaccaatcactgacttcaagaatattgttaagcatgttacttggtacaattctgcaactgataaggatgaatggaacaagatcatgatccagccgactgacagcaaggatccaagtgcccgagttccttatccagaaccacaaaacccaacaggtaatttaaagactactgatggttttgctgaggctaaggtaacttatgctgatggttcagttgactttgttaagattccacttaaggttactgaaaagaagtatagtgaagaattaacaccatcttatcctggtgtttccgttgagcaaggtaagtctgatagcgtagatccaagctttaaggatgaaaacgataaggctgctgatgctccagcgggtactaagtacactgcaggtaaaaatactccagattggattaaagtagatcctgatactggtaaagtaactgtttcaccaactgatgatactagtgtaggttcacatgatatttctgtaacagtaacatacccagatagcagcactgaccaattaactgtaccagtaactgttaccgaaaagagtaacttagctgagaagtatccagttagctacgacaagttaaatgttgaaaaacctagcggcgacacaccagcaactggtgcagtagatccaaaggctgctgcagatatgccagaaggtgcaatcactggttacgaaaaaggtgactttgatgctccagcgggtgtaactatcgatgtaaatcctgatactggtaaggtaactgctagtgtaggtaaaaacgcaacattaggttcatttgaagttccagttaaagtaacttatagtgacggtacttatgctgaagtaaaagttcctgtaagtatcactggtaacaaggttgatccaggtagtggtgacgttgtttactacggtgatcaaagtatggtggtcttcaatggcaaccttactactgttcacaagactactgatagccatgaattaagtgctaaagacagtgccttccaaacaatcacatattactctgattggaacaagaaaggtaacatcgttagcgactataacaagcatgtgatttacaagctaagtgctgatggtactaagtatgtaaacgaagctgatgctacggacagctttgatgctagtgcaattagctttaactggcagaagggttatggagttaacactggtgttgataactttagcaatggttctgcagacacactttaccaacttgaaaatggtgctgttaactctgaagagcaaactgatgccaatgatccatcaggtttagcaggtaactctaagtatcgttacgactttagtattagtgatactaatgtattgcaaaaactaggtttatcacctgctggttacaatgcttgggctaatgtttactacaacttccttggtgcaactggtaaaattaatattccagtaaactatggcagtgaagtatcaactgatgaagctggtattaagaattacttagcaactaacagtatctcaggtaagacatttgtcaatggtaacccaactggtattaagtgggctgaaaatggtatgccaggtaaagatggcaaatttgctgcttctaacatgactgggattgttgaatttacttttgataacggtactaagttaaatgttcaagtaacatttaagactggatcacatgttccaacttcaggtagtaaagttaatgacgatactaacctttatgtagaacgtacaattgaatatgatgtaactggaactggaactggtcattcaccaattaactcagtaacacaaaaggttcactatgtacgtgatggataccacaagattaatgctgatggtacagatgctggggaaattatctggaatgaatggaaactggctgatggtcaaactgctgaattcccagaatacagtgttgaccaaatcacaggctatgatgcatatatcaatggtgcaaaggctactcaagttgatgctgccaaagttgctgaaacaaatggcacaccacaaaatggtcaaaacatcacagtaacttacaaaaagcaaaatagtactccagtaccatacaaaccaggtaaagatggcgtaaacgatgccattaacagatatgtaactcgtacaatcatcgttaaggaaccaggtaaagaaccacaaactattactcaaactgttcacttcactaataaagataaagatggtaatagtggctacaaggatccagtaacaggcgagattaaatacaatactgactggcatgtagcaagtgatttgaatgctaagactggtagatgggaagaatatacagcaccatcagtaacaggttacactccatcacaagctaaggtagaagcaaaaacagtaactgcagaaactaaagctgctagcgtaacaattagctacactaagaatgcagatattccggtaccatacaaaccaggtaaagatggcgtaaacgatgccattaacagatatgtaactcgtactatcaatgtagttgatccagtaactggtaaaattagtacaagtgtacaaactgctaagtttactcgtgaagataaaaatggtaatagtggctacaaggatccagtaactggcaagacaactataaatccatggactccggctaaacagggactacgtgctgttaatgttgagcaaatcaatggttatgtagctaaagttgatggtaatgtggacgcagtagttgtaactcctgattcagctaatatggtagtaactattacttaccaagctaataaaccagaaggtcaaaacattgctgttaagaaagatacagtaccagatccagcagatggtattaagaataaggatgacttaccagatggtactaagtacacatgggagaagactccagatgtaagtaagccaggtgatgtaccagcaatagtagtagtaacttatccagacggttcaaaggacaaggtagatgttcatattgttgtggataacccaaccccagagccacaagatgttcacactactccaggtgtagtaccagacccatcaacagccatcaagaataaagatgagatgccagatggcactaagtacacatggaaagaagttccagatgttaactctgtaggtgagaagactggtatagtaactgtaaccttcccagatggcacatcagtagatgttaaggttaatgtatttgttgatcctgttaaggaaaataacaatacaattgcagattcaaacaatactaattcttctgataagaatactgcaaatgctgcaacagttaatggtaagtcagaaaacaagaagactttgccacagactggttctaagtcagatgccgctgcaattgccggtttagcagttgccatcgcaggtagcttattaggcttaggtgttaacagaaagaaacgtcaaaagtagaagaactatttataattgatccaaagaaagattaggtgataaacctaatctttttttgtgccttaatttgttatttgatcatgtttaataattttgtaagcgtcaaataaaatagtgtacttaaaaaccgtcccagttactgttatactgagacggttatttaagttcttttatttacaatttatctggatcttctcttgccacggtaaataagcttcaagggtttccgaatccagaatctcttcattcggtaatttctgaagcaaataattcaagtacttttcaggatcaaggccatttctcttggcagtttcaattaagcttagaataaagccacttgcagtagcaccctcaaaactttgagaaaataaccaattcttccggcccatgacgagtgattttacagcgcgttcagccttattgttagataattctaaattgccatcaagcaagacatgctcaaaagtagcttgatgcttgagggtataattaatggctcttcccaatttagagcctggcaaaacggtgattttatttttctcacaccagttgaagaactcttgcatcagaggcttgagctttgcttgtcttagctggtaacgttcttgtttgctcaaattctcccaggtttgttctaagtaaaacatgcgattgcagtagttgagtcctttttgggcaagggacttttcagaagcctgttgtggtacggcttcgtgaaactttcttctaacatgagcccagcagccaactaaagttgctttcggcaattgctcataagcctgccacatatcacagtgcaaataaccgggatagtttcctaaaaagtttaaggcaaccttgccactccgggaaggatcatgatgatagagtgtaatcccgtattgatcatgtttgcctgaaaggaagacccaatagtaagtcttgattgttttactttctaagactgtataataagtttcatcggcatgtaaaattggccgcattaacagcttttgcttaagcagatcatacactggtttaaagtagtattgactgcttttcaaatcccaataatttaacatctgtcttgaaacttctagtcccatcttcttccagtcgctttcttgacgatagtccggcaccttcatttcatatttttgataaagtgaatgagcgatgagtgaagctgaacctagaccatggtttaggggagctttaggtactgcagctttaatgatcttgtcgctaagatttctttgactgcaatatttacatttgtaagcatgttggatatggtctaaccttttaagttgagctgggataaacaataattcttggcgaactgactgcttgcctatctcaatcagttcatgatgacaatcaggacaatgcttgtcgcctaattcatggtgaacctcttcagctggaagggcagctagtaagtcagcacgctttcgtttgtgagcttgtcttttataagtaatagtctgaacggcggcgtcggggacgttctccgtcatcttgagcatcaggttcatcaaagagacttgtttgtccatttaaaggcatttgttctgaagatttgccataacgtttttgcgttaagtaagctacttgttcacggaggagcttaatttcatcagttaagttttgaatagtagttgcttgttgtgcaataatcttttccaaattttcttgtgacatgagttaaacttcctcctaaatttattagttaaaagaatatcaaaaaagcgtgcgatgtcaagtgttagtagaattcgcacgctttcgtgttctttatttttggattgattgcgaagcccttcattagccagtcgacctgctcagaagataaagcttgaacttcattttgattcctgggccagttcaattttccattttcaaatcttttgtagagcagccaaaaaccttgtccgtcccaataaagggctttgaagcggtccttgcttccgccgcaaaagaggaagactttgccgctaaaaggatcaagttcaaactgttctttgactaaagttgctagtccatcaatgcctttacgcagatccgtcttgccgcaaacgatatagacttgccctaagtcactgagcttaatcatggcaagactttctcaagcagcttattcataatttcagggtctaagctgctgtaaaaattcagctctaagtcattcttctttaaactaagcaacagattattgcgtggtggacgagccttcttaggtttagaagaacggccaagtgccacaatgggttgttgtttttcgatcatattcttaacctccattaaattgatgagattagaatacctgaaaaatacggactaaaaaagatactcggttatatgacgcttacataatttttccttaataaatattcataaattatatatttatatacgcgtggtgctagttaaatcgttttagttaataaaaaagtccaatcttgttagactcgacttgtaaatagtaataatagaaaagagtctgatctgattgaactgccttaagcttaagcgttttagccaccatttacaagttagttttaaagatttagtgataatttgtcggcactggtatcgtttgtatgcaccggctgagtttactcatcggcgaaatattgatcaaattaaaactacggacagtctgattttggctttacttatctggcaagctaagacaggaattgaatcacaaagaagattctgtgaatgtttcaattgtttatcacactcacgttttaatcgacgttcacgtcagctattgcaattgatttatcagatacggcaagaaatgaataaaaaggttgacctgaatggacatttcttgatcattgacagctttccggtacctgtttgccaaccaattcgcaactatcgtgctaaaatttttcgcggttatgccaacattggttataaggccaccaagaaaatttacttctatggtttcaaagttcatgtcattgttagcgatgacggttacattcttgattatgtcgtaacaaaagcatcagttcatgatgccagggagacagttgaactgctggaaaatacccatccatctaattactatcttcttggcgacgaaggctatttaggcaaagaactgcatcaacagctaaaacaaatgggttatgaactttggacaccatatcgtaaaaatatgacaggagctaaaaagcacaatgatcatcaattgatggctattcgcagaacaattgaaagcgacttttcgcttctgacctattacaatgccgagaacaatcgagcacgtagtctgataggctttcaaagccggttggaaattgcaattttagcttataatttggcttattgtctagaacgatttaactagcaccacgcgtatttatatgataatagctgtttttttgaaagtaagaaactgtcaaatcttttgtgtaaatagagaaactgtcaaatcttttgtgtaaatagatctttctcgtaaattgattttttaattatttatttaatcaaagtaggattctaaggtgtcctgaacctgaccaaagcctttatgaattcgattgaaataacggtcattgtagctcattgcctgaatgccaataaaagcatcaagcgactgttcagttggaaactctgccttaggcttagctttgcgcttgatcacattgttaaatgattcaatcatgttagtcgaataaattgaagctctgatctgcttgggatagttataaaagaccagcagatctggttctatgtctttcaagcttctgataacatggctgtaaaccttgccccatttggtatagaagtcatgcaggacagctgtggcttcttctttgtttgtctgttgatgcacctgtttgaattcgttcatgatcttttcacgatcgtcgacgcgtactttagcgcagatattgcgcatgacatgaaccaaacagcgttgaaaatgagctttaggataagtcctggctaaggctgttttcatgccaacaacaccatcagaaagaaaaagctcaacttgctttaagcctcgggatttcatgttttgaagcatatctgtccagacttcaatgttctcgctaggtgcaatgcagtagtcaatgacctccttgtgcccattaggcttgatgccaatggcaatatagactgcttcacgctcaaatgtttctcggcgcaaaggaaggtatgtcgcatccaaatagacgcagaaaaacttgtcgcttagcttgcgtttgtggtaagcctcaacctttggaatcatctgcttggaaatatttgatacctgagctggactgtaatggctgccatacatcttttcaattagatcggctatttccctggtggtcacgcccttggagtaaagcttgataatcatgctttccaagatatccgagtgctgcttgtagtcaggcagcgtgtgctgatgaaattgaccgttgcgatcccgaggcacttgcacttcaattgggccaaattgcgtatcaactttgcggaaataagcaccatttctagagttgccagtattccagccatttctggcatagggatcatagcccagaaaggcagtcaattcagcttctagcaagttattaacagcctgttgtagttctttgcgcaataaatcatttattttgtctggattgaatagagcttgagcaaaatctttggtaaaatcattcatgaaggagttcttctttctgtatgtgttttttttgttcaaaccaatcatacgagaaaggaactcctttttctaatgtttaaagaaataaatttaaggaatcattcatccttacacaaaatattttacagtttcaaaaatgacaaagtaaatttgcaagaatagagttttattttaatattaatatttactagatatagattaagcaatgaaatgatgattttaaagtggtatgacacagattataaaacaggacatctgagaagcggtaatatggttaccatatttatgctgatagccactgttgccaagattgaagtaatcttaaatagtaatccacattggtgccttccaccatttaatgaatttttgtttagtagtgagataaagcgtagtgtgtttaagcctgatgatgagttgaaacaatttattagagattttaataagaaacaccaaaaacaaaattgataaatttccacttgtaactactattcttgtttaatatcttttgatatagttttaaacaagaggaaaaacaaatgttttgtcttaaatcattatttaactcatgagaatgtaaatacgataagcaatggtttaaaatcttcacgacgtccattttttatttaacttaagagaattacaattaaagctccaatcggggcttttttctttttcattaaacttcctattaaaagattacccttgaaactggtaaaatagataagtaagtatagagaacaatttttataaaaggggaataaaatggcagataaaaaattacttctaatcgatggtaactctgtagctttcagagccttttacgctctttatcgtcaactagaatctttcaaaagtccggacggcctgcacactaatgccatttatgcttttaaaaatatgcttgatgtccttttgaaggacgttgatccaactcacattttggtagcttttgatgcaggaaaagtaacttttagaacaaagatgtatggagaatataaaggtggacgtgccaaaactccagaagagcttctcgagcaaatgccttatattcaagaaatgcttcatgacttgggtattaaaacttatgaattgaagaattacgaagcagatgacattattggtacttttgtcgataagggtgagaagaacggctttactactactgttgtgactggtgaccgcgacttgactcaactcgcttctccaagcactactgttgaagtaaccaaatcaggggtttctcaacttgaagcctacacgcctgaacatatgaaggaagttaacggcgtcactccaactgaattcattgatatgaaggctttgatgggggataattccgataactatcctggtgttgaaggtatcggtcctaagacagcctctaatttgattcaagaatatggttcagtagaaaacttatacgatcatattgatgaaatgaagaaatctaagcgtaaagagcgtttaatccgtgacaaggacaaagcatttttagctaaaaaacttgccacaattgaccgtgattcaccggtaactctagatatcgatgatataaaacgtcagccagttgattatgaaaagctgcgtcaattctatgaaaagatgaacttccgtaagttcttagctgatttaaatgcttcaggtgccggtcaagatagtactgaagttgaaaaagtggaatacatcgttttaaacgacgacaacgttaaggatgttaaggctactgaagatgacaccattgagttttatctagaaatgctcggtgctaactatcacttagctccttttgttggcttcagcttgaagatcactgacaagatctacgtttcaagagacgtggaattgcttgaagaagataatatcaagcacatcttagaagacgaaaagattaagaagaatgtctttgacctgaagagaacaatggttgctgcacatcgtttggacattcacactcacggccttgattacgacatgcttttggcatcctacttgatcaataatgaaaataactctaacgaccttggtgaaattgcccacctttatggtgattactccgttaagactgacctcgaagtttacggaaaaggtaagagcgagcacatccctgatgacgatgatgaattattcaaccacttagcttctaagatcaatgctatcgaatcacttaagaagccactgcttgaaaaactcaaggatcatgaacaagacgacctatttgaaacaatcgaaattccaaccgcgcgcgttttagccagaatggaaatgaacgggatgaaggttgaagcaagtactttaattcaactgcaaaatgaatttgccgttaaattgaaggaactcgaagacaagatttacagtcaagctggtgaaaagttcaatttgaattcacctaagcaattaggtcacattttgtttgaaaagcttggtttaccaccaatcaagaagaccaagactggttactcaacttcagttgaagtcttggatcaattaaagacgcaaagtccaatcgttagtgaaattttggattaccgtcaaattgccaagattcaatctacctatgtaaagggtctgcttgacgttatccaatcagatggccgtgttcacacgcgttacttgcaaaccttgactgcgactggtcgactttctagtgtggatcctaacttgcagaacatccctacccgcaccgaagaaggaaagcaaatcagaaaggccttcgtgccaagcgaaccagacggctacatcttctcttgcgactactcacaagttgaactccgtgttttagctcacgtttcgggcgatcaaaacatgcaagaagccttcaagaccggatacgatattcactcacacaccgcgatgaagattttccacttggattcaccagatgaagtaacgccattgatgaggcgtcatgctaaagccgttaactttggtattgtttatggtatttctgattatggtttatcaaagaatttaggtatttctagaaaacgtgctcaagagtttattgacaattactttgaacaatatccacaaattcgtgaatatatggataaggctgtgcaaacggctcgtgaaaagggctatgcagaaacaattatgcacagaagacgctacttgcctgatattcatgctaagaaatttacagttcgttcttttgctgaaagaactgcgattaactcgcctattcaaggatcagcggccgatattatcaagattgctatgatcaatatgcaaaagaagctagatgaactacatttgaagaccaagatagtcgttcaagtacatgacgaattgatttttgatgtgccaaaagatgaattagaaacgattaagaagatagttccagaagttatgcaatcggcagtgaagcttgatgtgccattgattgcagattctggttggggtcataattggtatgatgcaaagtaggtgatttaatgccagaaatgcctgaagtcgagacggtgcgacggactttaactccgctaatcgttggaaaaacgattgaaaaagtagtactttggtatcccaaaattgtggcaacagaccataagaaatttatcaaagaactaccaggtaaaagggtcttaaagattgatcgctatgctaaatatttactgatacgcctaagtgataatttaactattgtgtcacatttacgcatggagggaaaatatcatttaaccactcccgatgcgcctaaggataagcatgaccacgtagagtttatttttactgatcaaactgccttgcgttataatgacgtgcgtaagtttggccgcatgcagctgattttaacaggtactgagcgccaagtgacggggattggcaaactgggccctgagcctaatagcatagaattttcgtcagattattttatcaaggccttgagccgtaagaagaaaaatattaaaaatgtcttgcttgatcaaacaaccgttgcaggtttaggtaatatctatgttgatgagacactgtggcagagtggaattcatcctttgagtgccgcaaataaaattccgtcagaaaaagcaaaagagctgtggcagaatattaaccaaactattaaaattgcaacaaaaaagcgtgggacgactgttcatacttatttagatgccaacggaaatgttggtggctatcaagaaatgctcaaggtttatggtcatgcaggtgaaccttgtgcaaagtgtggcacggaactagaaaagattaaagtatcaggcagagggacaaccttctgtccacattgtcaggtggtttattaatgagctatgttttagccttaactggtggtattgcaactgggaaaagtacagcggaccagttttttaaagcaaataaaattcctgtgatcgatgatgatcagattgctcatgatttgatggagcctgggcaagcttcttggcaggcgattaaagattattttggctcagagtatttaaatgatgaccaaacgattaatcgaaagaaattagggcaattggtatttaaggattcgcgggctttaactaaattaaatgagttaacgcatccgttgatttttttgcaaacaaagaaattgctaaatcaatatcaagctcaaccaatagttattcttgatgtcccactttattttgagtcagggatggataagaaagatatagctgacggtgttttagtgattactttgcctgagaaaatgcaattacagcgtttgaaggagcggaatcatttaaccgatgaagaagcaagaattcggatgcaaagtcagttgcctatggtcaaaaaagagcaattggctgattttgtgattgaaaatactggtacaataaaagaactagagaataaactagcacaattattggtaaagattagagaagagggatagctatggaatgtccaaattgtcatcaaaatgcttctcgcgttattgattcgcggcctagtgatgaaaaccgggctattagacggcgcagagaatgtgaaaattgttgttttcgctttactacttttgaacgagtggaaactgctcctttgttggtagtaaaaaatgatggtactcgtgaaccattcagtcgaaagaaaattttgcacggagtaatggcagccggacaaaaacggccaatcagtagtgaacaatttgagcaattggttgatcgtgtcgaaaataagataagaaaacaaggcgttagtgaaatttcatctaagaagattggtcagtatgtcatggatgatttggctaatttggatgacgtagcttatattcgctttgcttcaatttaccgtgagttcaaggatatgtctagctttatgaagacaatggaagatatgatggccaaaaaaggaaagggtaattagtcatgtttgcaacgtctgatcctaagcatctttattatgtagccaacaagattaccctttttccagagaatgagaaaatcttgattaaactgtatcagcctttggttggcgcggtggcaattgccttgtatcagactttaatcaatgactatgatccatatggtattgtttctgatgcaaagggaatttattcactacaggagcaacttgattgtagtttaaaagatatgtttcattctttgcataaactggaagccgtaggtttagtgcaaacttttttagcggataatgtcttcaataatatcattgtttttaagttattacaggttcctagtgtagacaaattttttgcaacaccactgctagcaagtttgttgaaagaaaaagttggcagcccaacctttcatgacttgagtcatgcttttgctaaggaagcaaaactgcgtgaaaagccaatcaagaatgcgcgcgatgtctcagccaacttttttgatgtttttcgcttgccaggggatgaagcaattaatccatctaatgaggtagtagaagctgcgcaggaaaataaagcgcctgaggtagaaactgctgaaattaatgcccaggatccaattgattgggatctgattaaagatcaatataatgtctatcaaattccagctcaagaagtagaaattaaaaagaaccaaattcggggcttaatacagacatataatttatcggaacaggaatttgtggatgagactgttccctgtttgcatggtacacataaattaaacatgcatgaaattagtaataccatagcagaaaattataaacgattgcatactagggaaaacattcaaaaacaaattgaagaaggcaaaaagcgcgctattgcgactatcaaaggtttggacgctaatgatagaaaactgttactcgaagctaatgaaaattccccatctgaatttttatacaaattaaaaactgaaaagggtggaattgtagctccaggcgaaaactatattattaatcagctgcacacgcagtatggcttgccggaagatttgattaatattttgattcatacctgtttgacctacgatactgttgtaacttctaatcgtgcttatcgaatagctaatgattggctgcaaggtggtattagtactggggtacaagctcttgaatatgtgaagaagcgtaaagccgatattcttaaaaagaaaaatcgacagtcatatcgacaaaataagcgagtcgaaaaaggtaccgattggagcaagaaaaaggctaaaaatgaaggtatgtcaatagaacagctgaaggatatctttaaggatctgaaaaataagtaaatagagggtaggtgaaataatggaagcaattggtgatttgcttaaaaaaatagttaaagagcgtaatttaggtaatgagaaagaactgttgaaaactgctttacacgatccagatgtgcaagcgtttttgcaggcaaatagggaaaaaatagataaggcgatgattcgaaatagtatggccaatatctatgaatattatgcgcaaaaacatagtcagaatcaggtgctggccggttatgctccgcaattatttttgaacggcaaagtaattgatgtacgttacaaacctaccgaggctaagattgtagcagatcagcaacgagcagccaagcggcgtcttcatttaattgatctgcctgctaaattgcatgatgttaatttaagtgatattgaggttacaaatgatcgccagcaagctttaaccctgatttatgattttttgaaaaagtacaaagctgatcctcaccaacaaggcctttatttgtcgggcgactttgggatcgggaagacctatatgctagcgggacttgcaaactatgtagcaactaattttgatcggaatgttgtatttttacatgttccaacttttattgcaggtttatcaagtcattttggtgataacagcttgcaagatgagatcaggaatttagctgaatgcgatgtcttaattttggatgacattggggcagaaacattaagtcagtggtcacgtgatgacgttttaggagtaattttacaggcaagaatggataatgttttgccaacctttttctcttctaatttagatatggaagcattagagtcacactttgaggaaacccgtaatgcaactgatccagttaaagctaaaagattaatgcaacgagtacgttttttagctaaagaagtagtagtttccggtcccgatcgacgaaatttttcgcattaatttcaaaaagttcttgcatcgttcactttgatgcgtataattgaagttaattaaacgagacatgatgatgttcggctcagagagaaggacctagttctggaagttcttcattagaaaatcaccccaatcgtttattcccaaaattgaattttaagaggctggatacctttatcaatctatacgagaggttagacgtacgctaacctgaattttgggtggaaccacgcaattaacacgtcccagtgcttttattagcactgggatttttttattggaggtaaaaatatgagtttttcaattactttgccagacggttcaaagaaagattttgataaggctgtttcagttaaggaagtagcttcatcaatcgctacatctcttggaaaagctgccgttggtgctaaagtaaatggcgttgttaagccacttgattatgaaattgacaatgatgttgaagttgctattcttactgacaaggatgaagaaggcttagacattttaagagctactgctgcttttgcacttgaagcagttgctaagaacaagtacccagaacttcgtttgggtcaacatgttgctgatgaaggcggcttttacgtagatactgacaaagatgaccaaattaaggttactgaattgccagaacttgaaaaggctatggaaaaattagttaagagtggtcaagcaattgaacatgttgtaatggacaagtcagaacttgaagatattttcaaggatgacccttacaagactgatcttttgaagaaaattgatgctgacaaggttgatgcttacaagttaggtgatttcgttgactttggctttgatgctttattgccaaacactggtaagattaagcacttcaagcttttgtcagttgctggtgcttactggcttggtaaatcatccaacccaatgcttcaaagaatcttcggtactgctttcttcaaggaagctgctttaaaggaagatttgaagcgtcgtgcagaaattaaggaacgcgaccacagaactatcggtcgtgaccttgacttcttcttcgttgatcctaaggttggtgctggtcttccttactggatgccaaagggtgctactattcgtcgtgttgttgaacgttacattatcgaccgtgaagttgctgacggttatcaacacgtttatactccagtattaatgaaccttgatgcttacaagacttcaggtcactgggcacactaccgtgatgacatgttcccaccaatggacatgggtgatggcgaaatgcttgaacttcgtccaatgaactgtccttcacatattcaaatttataagcaccacattcgttcataccgtgacttgccacttcgtgttgctgaacttggtatgatgcacagatatgaaaagtcaggcgctttgtcaggccttcaacgtgtacgtgaaatgactttgaatgatggccacacttttgttgccttggatcaagttcaaactgaattcgctaagattttgaagttaatcatggacgtatacaaggacttcgatattactgattactacttcagactttcataccgtgatccaaagaatactgacaagtactttgcaaatgacgaaatgtgggaaagaagtcaaaagatgcttaagggtgctatggatgaccttggccttgactatgttgaagctgaaggtgaagcagcattctacggtcctaagcttgatattcaaactaagactgctttgggtaatgacgaaactatgtcaactatccaacttgacttcatgcttccagaaagatttggcttaacttacgttggtcaagatggtgaagaacaccgtccagttatgattcaccgtggtattgttggtactatggaaagattcattgcttaccttactgaaatttacaagggtgcatttccaacttggcttgctccagttcaagttaaaattatcccagttaaccttgatgctcatggtgaatatgcagaaaaggttcgtcaagaacttgctaagcgtggcttcagagcagaagttgatactcgtaacgaaaagatgggttacaagattcgtgaatcacaaacccaaaaggtaccttacactttggtgttaggcgacgaagaaatgaagaacggtagcgtaaacgtacgtcgttacggtactgacgaagaaatttctaagagccttactgattttattaatgaaattgatgcagatgttaagtcatactcaagagaaaattaattaatataattaaaaaataaaataaaaaaacgtatgctatgccaggtctaattaagatggctttattgcatacgtttttttggtaaagctaatgtaattgattttttacgtttgtaagtaagaagtaaaagaactgtcatcccctttaacttttatgaaatattttaatgaaataatgaaaataggagttatataaggaaaggtgataaacttgaaaaataagctcattatatttatgacaactgcgctattcatgttagctattattgtaatgggtcaaaatagagtagatgctgcatcctggggagctaagaatttatttactacaccaaaggaaactcgcggaacatggtactataagcaagaaggcaaaataaagaagcttaaaattacaacgcatacatttaataaaatcaaattatataaaatgttgagcagtaatcaagcgattaagtggactaaaaaattagctaaaactgataaaaagtcggggtataaattagctcaaaaagttggtacctctcaatacgaagctactgattttaaattttataaaacagcaggttttgctgccaatggttggctttctagtgatagagctgattcaggacacacttatgttgctataaagaaaaaagataaaagtaataatgataaagtagatgcactgcggagactgtaaaatagtttgtgtaaggatgaataattccttaaatttatttctttaaacattagaaaaaggggttcctttctcgtatgattggtttgaacaaaaaaacacatacagaaagaagaactccttcatgaatgattttaccaaaaatatagcacaagctctattcaatccagacaaaataaacgatttattgcgcaaagagctacaacaggctgttaataacttgctagaagctgaattgactgcctttctgggctatgatccctatgccagaaatggctggaatactggcaattctagaaatggtgcttatttccgcaaggttgatacccagtttggaccaattgaagtgcaagtgcctcgagatcgcaacagccagtttcatcagcacacgctgcctgactacaagcagcactctgatgttttggaaagcacgattatcaagctctactccaaaggcgtaactaccagagaaatcgctgacttgattgagaaaatgtatggcagtcattatagtccagcccaagtatcaaatatttccaagcagatgctccccaaggttgaggcttatcacaagcgcaagctaagcgacaagtttttctgtgtctatttggatgcgacataccttcctttgcgccgagaaacgtttgagcgtgaagcagtctatattgccattggcattaaacctaatggacataaagaagtcattgactactgcattgcgcctagtgagaacattgaagtctggacagagatgcttcaaaacatgaagtccagaggcttgaagcaagttgagctctttctttctgatggtgttgttggcatgaaagcggccttgaccaggacttatcctaaagctcattttcaacgctgcctggttcatgtcatgcgcaatatctgtgctaaagtctgggtggatgaccgcgaaaagatcatgaacgaattcaagcagatacatcaacagacaagccaaaaagaagctgcagctgtcttgcatgaattttatgcaaaatggaataaagcttatagccatgttatcaaaggtttgagggaaattgagcccgatctgctggtcttctacaattatcccaaacaaatcagagcttcaatttattcaaccaacatgattgaatcctttaacaacgtcatcaagcgtaaagctaagcctaaggcagaatttccaactgaacagtcgcttgatgtatttattggcatccaggcaatgagctacaatgaccgctatttcaaccgaattcataaaggctttggtcaggttcaggacaccttagaatcctactttgattaaataaataatacgcgtggtgctagttaaatcgttttagttaataaaagttgtaggtaatttaaatagaaaagagtctgatctaattgaactatctcaagcttaagcgtttttctcaccatttacaagttagttttaatcggttaaatgtgatttgtcgctcgctatataagctttatgcgcctgatggacttaaacatcgtaaaaatgttgatcagaccaagcttcctgatagttctatcttagcgatgctcatttggcaaactgaaattggaattgaatctcaacgaagattctgtaaattcttcgttggcttatctcattctcgttttaaccgtcgagctcgaatgctcttgcctctaattcgttgtatccgtcaggcttggaatcaagaagtaaagacagctggagaatttttgattattgatagtttcccagtgccagtttgccagcctgtttgcaattatcgtgtcaagatctttcggggcgtagctgatattggttataaagcaaccaagaaagtctattattatggcttcaaggtccacgcaatagtaagcgatgatggcaattagaaaaagcattgaaagcgacttttctttgcttagttattacaacgctgagaataatcgagcaagaagtccagtaggctttcaacagcggctagaaatagctattttagcttataatatggcatattgtctagaacgatttaactagcaccacgcgtaaataattaaaaaatcaatttacgagaaagatctatttacacaaaagatttgacagtttcgcactgcgagtaggaaatggagcagataattcatttttatattattgttataagagcaaaaaattaatcaaataagttacccggatttaaaattgaagtgcaacactaattgttaaacaaaaaggccatgaagacctaaacttgaagtgaccaaaaatcaagaaaggaagatcttcatgaccaactcaaattctagcatttccaagcattatcatcaattgaacagcgaacaacgtggacaaattcaagctctgcttgattctggcataacctcctgcactgctatcgctcaagaagtaggctgtcataaatcaactatcagccgtgaaattagacgaggcagtgtcctgcaaagagacagcagctatgtcttgtatgagcactattacgctgatactgcacaaatttatcatgaaaagcgccgcagaaactgctataagtgtaatccactgcaacactatgccgtctttttcagaatgctaagcagacgctttaaagccaaatttgatgccactagcattgatgaattcgttggtgaatttcacaggattatgccaaattatccatgtcctagcacgcccactgtctatcgttatattgatcaaggattgctggatataagcaatatcgacctgccaatgaagcttaaaagacgcagaaacaaacgccatcatagtcatggtggccatgctccgcataaaaagaatcttggcaattcgattgaacagcggcctaaagaagttgaaaacagaaaagttcccctgcactgggaaggcgatttggttaaaggcgtcagacgtaaaaatcaacctgccttaatgacactgactgaaagaaccactcgttttgaggttgttatcaaaattcctgactatcgggccagtacttgtcaaagactgcttcaaaaggagattgacagacatcctaattggtttaaatcaattacgtttgacaatggttctgagtttgcggatatgaccaaaatcaaaggatgtcagatctactttgctcatccatattctccttgggaaagaggcacaaatgagaactgcaatggacttctgcgtcaattcttccctaagggcaaaagcatgaaagataagtcagctgcttatgttcaacaggcaactgatgccattaaccgcaaacatcgtcgaatcctccaatatcacacagcagaagaactcttcaagcaatacgttccttcatagcctaactgttgcacttaatttgacaattcaggatcaaataagttataataattttattgatgtgttcaactacatttttatatttttgcactgaaatcttaattcagtgcttttttcataaggattagactaaataagatgataatacgccagcgaaaaaattatttaacttctcaatttttatctaagattagtgccgatgggactttaaatattgaaaatttaattgtcctgacttgtgcaatttttattgcaagtattggactaaatgttaattcaacagctactattattggcgcaatgttgatttctcctctgatgggaccactactagcaattggcacaggtcttgctttatatgatgttcacttactgcgtaaaggaacaatttcattattagcagaaattattatcagtttagctgcatctacaatttattttcatttttctcctttgacttatgctagtcaagagattattgcacgaacttcaccaacaatctgggatgcgatgattgcgttttttggaggggtcgctggaataatcggagctcgcaaaaaagaagcaaataatattgtacctggtgtagcgattgcaacagccttaatgccaccggcttgtacgatagggtattcaattgcggcaggtaatcttaaatattttttaggatcaagctatttatttttgattaactgtgttttcataattttgactgcattcatgggtgtaaaaattatgaagtggttaagttattctactaagcaatctaagttgtttttcttgcacaagccgacctttaaagagtttgtgataattttagtagtaattattttaattattcctagtatcttgtcagctaatcagatggtgaataaaactctagtagatcaaaatgttcaaaatcttgttgttaatgaattaggcaatgttaatttaattaaggaaaatgttgatacgcaaggaaaaataattaatcttacagtttcaggcgataaaattaacgctaagaaaattcaagcggctaaagcaaacttaacaaaatatgacctgaaaggctattcactgaatattgtacaagtagctcaggttaatcccaatgcagaaaatcaattagatcgacaagtaaataatattattaatcagcgtcagcatgaacaagaacaagctgatgaaaaacgtcaacaagaacaagaaaaacgtaatcaaaaaattcgcaaactgtcatctgcaatatcttctgttactgcagttagtgataataaaaataagcaaattactttgatagagttaaaaaagccgctatctaagaagagaaaaaacgccttagtaagacaaataaaagataaatatccaaatattaatttagtggaatttgttcaagaaaatattaaaaattagaagaaactgtcaaattttttgtgtaaatagatttttctcgtagattgattttttaatcttttatttaatcaaagtagaattctaaggtatcctgaacctgaccaaagcctttgtggattcgattgaaatagcgttcgttgtagctcattgcttgaatgccaataaaagtatcaagcgactgttcatttgaaaactctgctttaggtttagctttacgcttgataacgttgttaaaggattcgatcatattggtggagtaaattgaaaccctgatctgcttaggatagctgtaaaagaccagcagatcaggttcaatctctttgagatttctgatgacatggttgtacgctctgttccacttgtcatagaaggcgtgcaagactttgatcgcagcttctttatttggctgttgatggatttgcttgaattcattcatgatattttcgcgatcatctacgcgtactttagcgcagatattgcgcatgacatgtaccagacagcgttgaaaatgagctttgggatatgtcttttccagtaccgtcttcatgcccacaacgccatctgaaagaaagagctcaacctgttctagaccgcgagacttcatgtcttgaagcatttccgtccaattctcgacgttttcgctgggagcaatgcggttaatcgatgacttccttgtggccattaggcttgatgccaatggcaatataaactgcttcacgatcaaaggttatgcgacgcaaagtaatgtaagttgcgtccaaataaatacagaagaacttatcgctaagcttgcgttgatgataggcttcaacttttggaatcatctgcttggagatgttagatacctgagctgggctgtagtgactgccgtacatcttttcaattaaatcggctatttctctggtggttacgcctttggaatatagcttgataatcatgctttccaagacatcggagtgctgcctgtagtcaggcagcgtgtgctgatgaaacatgccgttgcggtccctaggcacctgaatttcaatctcgccaaattgcgtatcaactttacggaaataagcaccattgcgtgaattgcctgtattccagccagctctggcataaggatcatagcctaaaaacgcagtcagttcagcttccaataagtcattaactgcttgctggagttctttgcgcaataaatcgtttattttgtcttgattgaatagagcttgtgccatatttttggtaaaatcattcatgaaggagttcttctttccgtatgtgttttttgttcaaaccaatcatacgagaaaggaactcctttttctaatgtttaaagaaataaatttaaggaatcattcatccttacacaaactattttacggtctcattatatctgtatattaatgcacaaatgctgttatatcaacgattagatacttcgctttataataaacagtgttattataaagatgccgagagggatagaggcaataaagaattagaatcgaaaggtgatatatatgttagatgttttaaataacaaagtagaattaagcaacgtacattttgcagaacacaaattagcaattgaagatgctaaaacaatgttagaaaacgaaggttggattgctactaagtaaaaagtgttgataattatgaaattaaaaacagaaaatgagacgcacgataaagtacctcataactgctataaattagctagtagttatgagtcgttttttattttttgcttgttatctattgatttgtagctaattctatatgacaatgatatctaaattattgaactataataaaaatccgttattttaatttggtctaagttgctatatattcaaaaaaatcgttaaatttttattatttatttggcggaatatgatatgaagaaacgtttcaaattagctgctatttttgtggctgcaatgttcgcagccgcacccgttgttggtatggcagaaacatcaactactgtttcagctgatgctgacatcatgcaacaatacacttttaatgactcagttttggactttactcctactttaaaggtttatattgctaagggtcacaaatttaccaccagtaaagaaactgcttacaaggcaaaataattaggattgattccgaaaatatagagctgttagatttaccgtggtctagcagcttttttgatgcaaaaaaataccactcaccgttaaatttagaccattcacctgaatttaataatttaacgaaaataagcaggtatactaataatcaatcaaggagggatgcaattgaaagttaaattgaatatcgatccaagtttaccagaagaaaaagctgaattttggttaaagaaaatgactgctagatttgaacggattactaaagagttgaattcggagcaggattttctttggtgctatctagatggggatgcctatgaaattaatttttctcaaatctatgcaattcaaatagaaaatgaaaaaacaatgatttgtactcaaaatcaaaaatatgtttataggggcagattgtatcaagtacaaagtgttctacctaacgattttataatgatttctagaggtgctattgttaattatcattttattgatcatctagaaattataaatacaggcaatattgatgcgcttttggagaatggactaagagtacaagtttctcgtagaagaataaaggatttaaaagagaggctaggattatgaaaaatattaaagatcttttatataacggtctgattagtggactgattggtattggtatcggtacgatctggatggctatggacttcttgttttcactaaatggtcaaaatcctgcaacagcgaagatatatttgaaaacctttcttttttggacgattatttcttttctcattggtattttcttttatctagctagctggatttttaatagtgaaaaatggtcattgaaaaaacaaatttttattaatttcttcgtctgttttgttgcctggttcttgttaaacctcctaattgataattttagtatttcactaaagatggttattagagtaacagttgattttattattatgtacgctattgcatacggtggatattttttacatttatggaacactgttagacgaataaatgcaaagttaaaggaaaaatagaataccataattaaaaaatgaaagaggtacccttgcatgactttattatctgtaaataatatttcaaaaacatatcaaaaagcacataaaaaggcggtatctgatgtttcatttaatgttgatagtggtgatattgttgccttcttaggtcctaatggtgcaggaaaaactacaacattaaaaatgattcttaatttagttagtcctgataaaggaacggttgtattcgacggaaaagatgtaactcacaacaatctctttttattgaaaaacactggcgttttattagaaggatctagaaatatgtattgggccttatcaccaatggaaaattttgtttattggggtggccaacgtggtttaagcaagaaagaggcagaaaaaagaggagaaactttcctcaaacagtttggtctgttggataagaaatacacctctattaccagattgagtagaggtatgcagcaagttgtgggaatttgctgtgctatgattgccgaaccaaagcttttaattttagatgagccaactttaggtttggatcttaatgctactcaaataatgattaagagtctgaatatgttatccgccaatggagtagggattctagttactacacatcaaatggaatttgctcaagagatagctaataaaattttattaatcaatcatggtaaacttgtcttttctaatagtataaaagatagtttgaagaagctgaataaacaagaaatttttgaagtgcatttcacccaagaacttaccgcctcagaaaaagaggatatacttgcaagctgtgaacttacaaagaagactgacggagtttatcgtttgggtgttaaaccgcaagcatctctttcacaagtacttaaattattgagtgaattaccaataagtagtatacaaactgtgactagaggattagatgaaatttttaagtactacacggagaaggaaaaatgataagttttaaagctgaattttggcgtcaattctatttatataagagatacctcttcaattatatttcagaatttttcttattaattttaatgtttatggctattttttggggcggtagccttgtaggaggtggcgttttaggaaaatcattgaatgccctagtagttggctatgttttgtggagtttaattgaaaacactattagccaaatgggatcaacagtgatgaataatgccaaaagtggtattttagaacaacaatatcttatgccaatttcttctagaagattatttttaaataaaagtattgcaaatattgttgtggcattcgtccaagcaattttaattctgatagcagtaatggcaatttctgatcactggattagttttccagtaataatgattgttccatttatattagctttactaactacagtgggattaggctatttaattgttagcttagttttacgttttaaaagaattggcagtaccttagtgatttttcaatatatttacttaggtatactactagttaattttgaaaactactccaatcttacaaaatgcttatcttgtttattgccaatttgtccaatggttagttggatgagattagcagttaacaatcgaccatacaatttagcgttttatttaagcgaatctatctttaataccgtattatggttgattattggattgctagtatttaatttagctgataaatatgtaaagaaaaatgggactttatctttttattgattttagttgctaataaattcattcatccctgaaaagtgattcttgcccacaaaaattccaaggaataacttctacttatgcattgttctgtggtagaaacgctgtaaagtttgtggctgcagcttgggtaaataataacgatcttcatgtttaaaaaatgaagaaaaaagttttatcatttattgccgcttttttagttgttttaggtttggctagcgttcatgcaaacacagcaactgctgctagttagggtgctaccaaacttttcaccacacttaataatacgcgtggtgtttggtaacacaaagaagctggtaaagttattagaactaaaattaccgcacatactattaacggcctcaaggtttataaggtattaaagggtaaagaggtagataagtgggataaaaagttaactgctgctgatgaaaaggctaactacaaattagttaacaaagtttctagctcacaatttgaagcttatacctttaaatcccacggtattacggtttttaacgcaaacggctggcttgctggtagcggcgacggctactactatgctcctatgaagaagaccgttaagggtaagaaagttaatgctttgcgtgtcggcggcggtgctggcaactactttatcagctacgcttacaaggataagaaattagcgtaaattgcaataataaattgaacacttaagctgcttgatagattttgtctaattctctttcaaagatttcatctggtgtgtgatatgccaatagttttcttggcaatgaattacaccaggtttcaatatcaatgatttcttgaagagaatagttattgatgtagtcacctttaggaatgaatctgcgaataaggccattgtgtctttcaacagtgcctttatcacaagaagtatacggatgagcgtaatagactaaagtgttagatactttctctaagttggatagatccgcaaactctgagccattgtcagttgtaatcgttttaaaaatttcattccagtgtttctatattgactgtgcaaggattgaaaagctgacattacactgttagccgttttatccggaatacgtatgatcaagaactctcgactcattcgttcagacaaagttagcagcacttgatcgtctctagtcttatgtcctaagactaggtcacattcccagtggccaaactcttttcggtcttaaatcactttagggcgctcttcaatgcttcgacctagtttctttttgtttttacggacacgatgaattttaatgttacgctttaatttttcgggtaaatcagagtttctgatagccaacaagccttggtctacatagttatacaacgttctagtacagactgtttattcgctgctaaattttcctatagccagacagcgattggcgcatacatcaagcgaccaattattttcaaagaagtgcttaatgacatacttaataaagtcattcttctttaagaaatctgacttgcgaccgcagcggtgacgatccaagtggtaaacttcattaccatgttttgctttatatcgcttttgcttgccattataaagcaaaactgtgccacgcttaacttcataactgatcgtagaaggagaacagccaatttcacgggcaatagctctaagagagaagccatccttgatacgagtttaaataataactcgctcttctagtgataaatgctttcccttttcgtgcttaggcatgatagaatgtaaagagtccatttgtgacctcgtttctgaatgttttgtggtaattacattttatcaaacaggtccaaatggactttttatttttctaaagtgttcaatttgattttacaatcggcgaaatagaaaatatgttaattcataagaaaattatttttcaaataaaggcactttcttttgtgatttaacttcaaaaagacctttatcagagatttttagactaggagaaacaagtaaagacaaagtagagaaagacataatttcgtttgtatttttatagcccaattctacgagatttttacgtatattaccaatttgttctcctaaaatcttcattggttgattgcttacaactccaccaattggaagaggagcattagctgcaatcttttcacctctggcgactatataaccaccttgctgattaattaattgatgttgaatgtcaatcatgccatctatatttgttcccattaccatcaaattatggtgatcgtgagcccaggttgcccctacagcaccatcaccaataatgccacgatcaactaggcctaagctaaatttaccatcatttaaaccatatctttcttggacaataattaaagctaaatttgcactttgccaatcaacgatatgattatgtacagctagccttttttgaatatgatttgtaaaagtaccgacaggatttatttgaatgacatttgctgtaactgagccattatcaacaagatttgttttaagtaataggtcttgtttagttaatttaggagctttcacactagtagttagactattaggtgaaaaatcatcttgagaagtatttttgatagtctcttttgcggatattccatttttatagacatcagctattgagagttcttctaaattatccagaatggagaaatcagcaactcttcctggtgcaattgcaccacgatcccataatcccatatgtcttgcaggaatataggtagaaatataaatggcgtcttctggcttcatccccatattgattgcttttttaactaataaatttaagtgaccttttaacaaagtatcaggcattgaatcatcagtaactaaggctacatgttcaaaatatttattatcaataatagtattgatgacatctggatgcatggattttaattgaacttcaacaaacatcccgtttcttatcttttcattgactaaatctctagtttgttgagtatgatcagtagtaacaccggcatataaaattttagctaaatcttcaccatgataagcaggggtatggccttcaattggcatagtaggtttagttttatgacaagtattaattatgtccttaattagagtgtccttgtcagaagtcatatctttaaagttcatgacttcacctaagcaaataaagcgtggatctttaagtaattcttttacttcaggcacaccaattttaccgccagttgtttccatttgaggattggttgaaggaacagaagaagggatgccgaagaaaatatcaattggcgaatcttcattaatgaaatcttttaatccattaataccggcgacattagtaacctcatgatcatcagcaataatagtagtcgtgccatattttagaattgtttcacccattattttaggtgtagtcattgagctatcaatatgcatatgggcatctacaaaaccagggattaaatatttaccttgtagatcgatgactttttttgcttttaaattaggtaattctttattaatccaatagaatttgccatttttaatacttacttgaacatcttgaaattttcgtaaatatacattaaaaacatgagcatttttgataattaagtctacctcagtcatttaaaatcctccataaaagataaggagctgaatctacaattcagctccttatagggaataaacatcaattatttattcataatcttattccatcttgaaatccagttagacatatgtgaatttacaaagaagaaattaatagtttttgctcttttagcaactgagccataagttttgtttgctgcttctgcaggtgttaatttaacttgagtgtttacaggagcgttgttcaaagatttaagacctgctactttcttttgaattttttcgcttaatctaaagttgatgtatttgtatgcagctgctgaatttttactattctttaaaatagagacattatcgtagttagcatatgtaccagacttaggaacgatgtattttaagtttggattagttgcttgaagcataccaacagcataatcaccaactacagcagcttcaatttcaccagatttaaacatgttacttaaatctgaactttgggtgtaagttttgacaacattaggttttaattctttcattgccttaaatgctgcatttccgttgtctttagttacactagtaccagcatagtcaccagcaatatataacattgcggggccaaaagtagttgtcatatcaggtacagcaatcttatttttaagtttagatgaccataagtccttccaagaattaatattaactttctttggattatagataatacccaaactgtttacggtataaggaactgtattagtttctttagctagtttttgttctgattttgataaatatttgaaattggaaatcttagagaagtctaacttcttaaataacttctttttatcgccagtaacagcattgttttgagcaagttcaattacatcaacacctgtattagggttatgttcaatttgagtaagtcttgttgcactatcaccaaattgagtttttactttaactgatgattgtttagcaaaaggatttaaaacatcgttccgcatttgtttggtagataaaccaaaggttgaaacagttaaatttcctccgttagaagatgattgtgatgaacatgcagttgtaccaaatgcaactgaaccaactaataaaaaacttgcagctaataaaccaacttttttaaaattcatttttattcctttctttacaattggttatctagacaacggatgaagatgcttggagggcaaataaagctgaactttatctcctgagctacgcatcgatttcctagactcttcaacagtgaagtctccgagactagtacttaccttatatttaaagctctgacctaaatactcaagactagtgattgttccatcaatcaaattattagacggattttcttctgaattaatcaaaatattttcgggtctaatagttaataccttagcttgaatattattttcatcagttaagaaaacaagatctttacttttaatttggcgatcattaataatttgaaactgtcaaatcttttgtgtaaatagatctttctcgtaaattgattttttaattatttatttaatcaaagtaggattctaaggtgtcctgaacctgaccaaagcctttatgaattcgattgaaataacggtcattgtagctcattgcctgaatgccaataaaagcatcaagcgactgttcagttggaaactctgccttaggcttagctttgcgcttgatcacattgttaaatgattcaatcatgttagtcgaataaattgaagctctgatctgcttgggatagttataaaagaccagcagatctggttctatgtctttcaagcttctgataacatggctgtaaaccttgccccatttggtatagaagtcatgcaggacagctgtggcttcttctttgtttgtctgttgatgcacctgtttgaattcgttcatgatcttttcacgatcgtcgacgcgtactttagcgcagatattgcgcatgacatgaaccaaacagcgttgaaaatgagctttaggataagtcctggccaaggctgttttcatgccaacaacaccatcagaaagaaaaagctcaacttgctttaagcctcgggatttcatgttttgaagcatctctgtccagacttcaatgttctcgctaggcgcaatgcagtagtcaatgacctccttgtgcccattaggcttgatgccaatggcaatatagactgcttcacgctcaaatgtttctcggcgcaaaggaaggtatgtcgcatccaaatagacgcagaaaaacttgtcgcttagcttgcgtttgtggtaagcctcaacctttggaatcatctgcttggaaatatttgatacctgagctggactgtaatggctgctatacatcttttcaattagatcggctatttccctggtggtcacgcccttggagtaaagcttgataatcatgctttccaagacatctgagtgctgcttgtagtcaggcagcgtgtgctgatgaaattgaccgttgcgatcccgaggcacttgcacttcaattgggccaaattgcgtatcaactttgcggaaataagcaccatttctagagttgccagtattccagccatttctggcatagggatcatagcccagaaaggcagtcaattcagcttctaacaagttattaacagcctgttgtagctctttgcgcaataaatcatttattttgtctggattgaatagagcttgagcaaaatctttggtaaaatcattcatgaaggagttcttctttctgtatgtgtttttttgttcaaaccaatcatacgagaaaggaactcctttttctaatgtttaaagaaataaatttaaggaatcattcatccttacacaaactattttacagtctcaataatttcatcaacattgatgaaattatcataaccgatgaatctagcaacatattctgaactagggtggtgaaagatgttttcaggagtatcatattgatcaattttgccatctttcatgattaatactttatcggaaatagcgaagcattctctttgatcatgagtaacaaaaagaactgtcatttttagcttttgctgcaattctctaatttcgctacgcattttaattcttaattttgcgtctaaattactcaagggttcatccatgagtaataattgtggattgactaccaatgcacgtgctaaagaaactctttgttgttgaccaccagataattctttaggatagcgagaagctaatttagacaagccggttatttttaaaatttgatcgactcttttttgaatgtcacttttagacatctttttcatttttaatccgaaagctacattattaaagacggtcatatgtgggaataaagcgtaactttggaaaaccattccaaagtttcttttgtaaactggtacttttccaacatcttcaccatcaactaaaacttgtccgtctgttgctggaattaaacctgctatgattcttaaagtggttgttttaccgcaacctgagggtcctagaatagatactaaatcaccgttttttacggaaaacgaaatatcttttaatactttggttttaccgttatatgattttgctaaatcttttacttctaaatttgccaatttaattgctcctatcagtaagtttatttagaccaactagtttttcagttaaaagcataattaatgctgtaaaaatcattagaactacagaaatagcagaaacagttggatcatagttgttttgtaaatagttcaaaattgctggtggcagcattgtaattgatggtccattcatgaacaatgaaattggaatattattaaatgaattaataaaacacatcataaaggctgctacaatacttgctttaatgttaggtaaaacgattaagaagaatcctttctgaggtgaacatccacaaacccaagctgcttcttcaatatttttatccattagtaacatacttgctgtaactagtcttattacataaggtaggcataataaaaagtgaccaataattagactaggcataacaggtagtctaagagtaacgacagcagcttgatataaggcaaagccaattacaatttctggaattagagtagggcttaagaagaaagagtgaaaccaagacttatgaacgatgttgaatcttgttaaagcataaactgcagggataccaattattaatgccgaaagactagcaataatggcaacgaacaaacttgattcaaatccactgataaaatctggttgctgaaaaatattggcataccaggataaagtaaaacctttaattggtagagaaattgaatcctgattattaaatgaagtaataattactaaaagtagaggaaacatcaataatatcaggataataatagaaataattgctaaagttttatttttacgattaagcattaatattaggtctcctatccaaagcgcgacttgcttttctcattaatatcattgataaagcagagataataatcagaactattgcaataacacttgcatttttccagttacctaatgtcatggcttgttggtaaatcaaggtagacattactaaatttttattacctcccaaaatttgtggggtagtatatgctgtcatcgcacctgcaaagaccaaaatgcatcctgttaaaattcctgagactaattgtggtattacaatttttatcaaattaacccatggattggcgcctaatacagcagcagcttcttctgcttcaatgtttagctcagaaatactaccaactaatgaaataatcataatcgggagaaataaataagctgaaccgatgataattgccgtatcagtataaagaatgtttaatggagaattaattaaatgaatagacatcagaaatttatttagaataccgttacgacctaaaataatgatccatgcaaagtttctgacaactgcattcgttaacattggaaaaagaatgataattgttaaaattgatcttactttgctcttttgacgagcaatccaaagtgaaattggaattccaagaattaaaacaatgatcatagtgagtaaagcaattttaaatgttctaccaattacatgaagattgtacgtgttttttagaaattcagtgtataggtgcaaaaatcctttagaatcttgaaatgttggtatagcaatctgaattaatggaaagaatgcaaaaatcaagacactaataaatgccggaaatagcagccaaaaaccggattttattttcatattgttcgtattcctccttatcttgtcttagaataatttaaatgtaaaaataagtcaatacaaaatatgaattaaaataatagcatttgtgttaattgtatgcgtattgtattatttatgaatataaatagatttatttataaatttatctttttaaaaatacgaacattaccaaaaaggaagtggagttcttaatgaaaaagccagttattattagtacagatccaggaatagatgacgcagttgcattagcaatatgtcttttttcgcctgcaattgaagttaaaagtattattgcaactaatggcaatgttaatgcgcaacaagctttaataaatatattgaaattggagaaatttttcggtaaaagtattcctgtagtaaaaggggtagagcgttcattagtcaaacaatctattcgagctaaagaaatacatggtaaatcaggaatggacggatatgattttccaaatcctagttttgaattggtggatcatggcatatcaccggttgccatacataaaatagttgcagcttcttctgaaaaagtaactcttattggaattgcaccacttactgattacgctctatatgttcgtttatacccagatgatataaaaaatattaaggaactaattattatgggcggagcaatgggtagaggcaattatggtatctattctgaattcaatattgcatctgatcctgaagctgcaaaaatcatttttgaaagtggattaaaaattagagtagcgcctttagaattaggtgcacaagctaaaattatgcctgaagtaagtaatcaaatacgacagttaggaaaagctggtgatatgttttacgacttatttaagaaatttcgaggtggcagttttcaaactggccttaaaatttatgatgcacttgcagcaggcgtacttttaaatccgcaaatgtttaaatttaaaaatacacatgtagaaattgatgttcaaaccggttatacatatggtgcttcattgatggattttaaaaataagctagatcttccaaataatgctgaaatagcagtgtctgtagatccagaaattttttctaaatggtttgtagaagctttatcaaaaacaagataaaaaagtcaattaattgtcaacaattaattgacggataatggttaagcgagtatactactactagttgagaacaagaagaagcacccgcttctcgcctaagttaagtaaacctctaggctgattgataatttctgttgattaaaggcgggtatgattcttataacccgcctttttcttgtcctcaaattaacacggaggtgaacagttataccaagaagtttaatcttaaacgacagaattcgcgctcgcgaagttcgtttaattgatgaagatggtcagcaagttggtgtgatgagtaaaagtgatgccttacgtcgtgcaagcgatgcaggtcttgacttagctctgatttctccaaatgctaagccacctgtagcacgtatcatggattacgggaagtaccgctttgaacaacaaaagaagcttaaggaagcccgtaagaattccaagacagtcagtgtcaaagaaattcgtttgagtccaactattgaaggtaacgacttcgaaactaaacttaagcacgttcgtaagttcatttctaaagaaggagctaaggttcgcgtctcaattcgttttagaggtcgtgccatcactcacaaggaattaggtcaacaagtacttgaaaaaatggccgaagtaacctcagacattgctaatgtaattagtaagcctaagatggaaggtcgttcaatgttcttgatgcttgcacctaagagtgataaggacaaaaagaaaaagtagttaattggaggaaatagaaatatgccaaagatgaaaacacaccgcgcttctgctaagcgttttaagagaactgcaaatggtggtttaaagcgtcaccacgcatttactggtcaccgtttccacggtaagacaaagaagcaacgtcgtcacttgagaaaagctgctatggtttcaaagagtgatatgaagcgtatcaagcaaatggttgctcaaatgcactaatacttgttcttaattaagacagactatagtaggaggaattttaaatgccaagagttaaaggtggaacagtaacacgtcaacgtcgtaagaagatcatgaagcttgccaagggttaccgtggcgcaaagcacatgcaatttaaggctgcaagcactcaattattcgtttcatacaagtacgcattccgcgaccgtagaagacgtaagagtgaattcagaaagttatggattgctcgtattaacgcagctgcaagacaaaacgacatctcatattctaagttaatgcacggcttgaagttggctggtgttgacatgaaccgtaagatgttagctgatattgcttacaacgactcaaagacttttgcacaattagcagaaactgctaagaaagctttgaactaataacaaaagaaataagctagggaaattttcctagcttatttttttatctatttttgaattaatgctcgtaatctaattttttcatctggcgtagtaaaggccgcgtcaaccgcgttgagataaagagtggtttcttcttcaggagtcaaggcggtcttttcttcaagcagttggtattcatgcggtaaattggtattggaaacgatcatatcatcagaatttagcgtgactttcattcccatgtgcaataatttttttattgggtaagaatcaatctgatcaaaagctttggtgttcatatttgaagtggcgcaacattccaatatgatttggtgatcaatcagatattgggtaagtgctggatcttcagtgcagcgaatgccatggccgatccgtttcgcgccaatttttaatgcttgacggattgaatcaggtcccgcagcctcaccagcatggatggtataaggaaggtgtaattcttgggcacgattgaaaaaatgctggtagttaatgttagggatcgggccttccgcaccagctaggtcaaggccaacaacgccatgacctaaaaattctttcgctagctcaaccgtttccatgttttctttttcattgtgggcgaagcgcatcaaacagagaattaaaccagcgtgtaattcaggctgatctttgtctgctttttgtttttgataaaacttcgtaataccgctgactgctgcagcgattacttgtctttgcgttaaaccatttttagtatgtaattgcggtgcaaagcggatctcggcgtagactagaccttgttgttttaattcgcaaagaagatcaaacacaatcatctccagatcatgctttgtcttcattaactggttaggtaagtcaaacttttccaaaaattgttccaagctagcgcaagaattatcaactgacaattcttgccgcaatttttgatcagttaactgtggcatgtgatgttcctgcattaacttcttaacagtagcaactgggacagaaccgtcgaggtgaaggtgtaaatcgatgaattttctcatggtgatcctttctgttgattgatgattttgcttaaattgtttagtattgtaacactttttcatcagaaaaaaacaaaaatttctaaagcaaacccatttttgatatgatataaggtgataaaaaatggaggaaattaacagttaaaagatagacaagatacaaagatctgttcagaaatataaaacatagaagcaggtcaaaaactaaaaatttaatattttgttcgcttgtatttatttcactctttgctaaatttatgtttgtattggaggtgaaacaaatgatcaaggctcaagtagtcgaattaaaacctaacaagaccatgcaacaagagctggataagctttgtgattatcgcagatattgctggaatcaagctttagccacttggcaagacatgtatgaagcacgaaccttagataaggataataatcccagtccaaatgagcgcagaatacgtgatgagctagtcgataataaggcagactggcagtttgctctgtctgctagatgcttgcaattagcagtcaaagatttggctaatgcttggaagaatttctttgataaggcacagcctgattgggggaaaccacatttcaaatcaaagaaggccccgcgacaaggctttaagactgaccgggctaaagtggttaatggtaagctacgcttagacaagcccagaggcattaaaacctggttcgatattccaacatatgaagctttaaaaatgaagcaaattaaagttgctagtgtctttagagaaagaggacattattatgccgctctttcttatgaagaagaaactttggtaaagcctagaacaggtagaaagacagctgttgatgttaatgtgggacatttcaactacactgggggcaaaatcaatgttttgccatcaagattgcaaaaactatacaagcgcattaagcattatcagagaatgctggctaagaaaagacgggctaatggcaagttagctggccaaagcaataattacgtgcaagtgagaaccaaactgcaacgtgattatcgtaaagtagccaacattcaaaacgatcttttgcaaaaattcactacaaaattggttaataattatgatcaaatagtgattgaagacctagccgttaaacaaatgatgatgacgcacgtcgcttcaaaaggcatgcagagatcattattcagtaagtttagacagatattgacttataaatgtgagtggtatggcaaagaattaatcttggctgataaaacatatccatcaacccaaagatgtgctaattgtggttatgttaaaaaaggtgatgaaaaaatcactttgcaaggcaaccaaaaacatcacactaagcacaatgagtatatttgttatgaatgcggttatactaatgatcgtgatgataatgcagtgttaaatcttttagctttagcaaaataatgaaaacggggctggctaagcccttaagctgcaagagttagtcaatgcgattactcctagattggaatattggaatactaatgatgacagcagtaaataaagcgaagaaaggaaggactatatttctttctgatatgtaaaaaatatacattcttctacatatttctatgttttatatagcagtgttgatatgctttttagaccaaaatatacaattgatacgatttacaatctggacccccagaagttgaatgaaatggacattaaggcggttttttcagacctagataatacattgctcgcctggaataaatttgaaactgccaaagaaatggataattttaatcaaaagttagccaaggcgggaatcactctcgtggtcatttctaacaataatgctcaaagagtgggcaaggtacttgatccttaccatatcgaatttgtcgctaagtcacgtaagccattgccatttgcgatcaccaagaagcgcgaagcaatgcatttgcaaaaagatcaggttatgatggttggcgaccaactaatcactgacatgcaagcagggaatttggccggcgtgaagactgttctagttaagccattagttgaaactgataagtggaatacgagaatcaatcgtttctttgaaaaaattatctttttcttcctaggtttatcacatcgagtaacatttaagaaggagctatcaaatggatgaggatattatttgtatcggctgcggtgccaagctgcaatccgatgatcctgaaaaagcaggttatctgccaaaaagtgcactagataaggcaaagcaagaagaaaatgcggatgtttattgtcaacgttgcttcagattgcgccattataacgaaatcatgccagttgatttgaacaacgatgattttttagctttgcttaactctttaggacaaaagaaagctttaattgttaatgtagttgacttatttgatttttcaaattctttgctatcatcattgaagcgttttgttggaaataatgattttattttagttggtaataaatttgatctatttcctaaaaactctaagcaaagtaagattaaggattggatgagacaagaagctaaccgaatggggctttatcctaaggaaatcttcttggtttcagctaaaaagaagttgaacttggaagatttgatcgcttatattaataagcaatcgcaagacaaagatgtctattttgtagggacaactaatgttggtaagtcaactttaatcaatgccattattgacatgatgggtgatattcaagacctgatcaccgcttcacgctttcctggaactactttagacaaaattgaaattcctctagaaaatggtcactttttgattgatacgcccgggatcatgaccgagaatcaattggctacgcacttaaatgctaaggatttggagctggtctcacctaagaagcctttaaagccagctacttaccaattattgcctggtaatactttattcttagctggtttgggacggattgattatctcaagggcgaatcgactagctttactgtttacgttgctcgtggaatgtatattcaccgtactaagacagctaatgcggatgacttttataaaaagcataaaggtgaattgttatccccaccagctgcagatgatgaaatggcaccactaaagggtcaagaatttagaacggaatataagagtgaccttttatttggtggaattggttttgtgactgtacccaagggatgcgttgttaagacttacacaccagatgggattggtttaggtattcgtcgtgcattgatttagaggtttgcatatggttaatccaaaatgtattgaaaaaatgccaactgctaaaattgaagcagaattggaacaagaacaaggtaaaggtcgtcagattgggattatgggtggtacctttaatccggtgcatattgcgcacttggtagcggcagagcaagcaatgactaagttgaagctggatgaggtctggtttattccggataatattccaccgcataaaaatgcgccgctgacttctgctaaagatcgggcaacgatgcttgatttagctacgcgcgataatcctaactttagggtaaaactattggaattgttccgaggcggcgtttcttatactgtggatactatgcgttatctcaaggaaaaagcacctcagaatgactattatttgattatgggcagtgatcaggttaacagtttccatacttggaaggaagctccgaccctggctaagctagtaacattggtcggaattcgtcgtccaggttatccacaagatccgcaatatcccatgatttgggttgacgcaccagatattcgcctaagttcgactgctattcgtcgcagtgtcgcaactggcacttcaattcgttacttggtaccagaagccgtcagagaatatattgaagaaaaggggctttaccttgacgaaactaatttttaaaaatacttattcaccattctctagtgaacaaattgttgctaaagaaaaagcaaacatgaagaaaaaacgttttgaacattgtgttcgtgttagtgaaactgcacgtaagttggctaagttaaatggatatgatgaagaaaaagcagccttagctggctttgttcatgattatgccaagcaggtaccggtagaagagtatcgtaaggtaattaaggaacaggattttgatccagatttgcttaattggaatcgggccatctggcatggcattgtggggactttctttattgaacgtgatttaaaaattagggatcctgaaattttaactgccgtacgtcgtcatacgactggtgatactaagatgactacattagataaaattatctttgtagctgattttattgaacccggacgagattttccaggagttgaagaagcgcgcaaagttgcttatgctagtcttgatgaaggggtaggctatgaattgcagcacaccttagagtttttaattgaaaataaaaataaagtatatcctcgtactttagaagcatacaatgtatggggaattaagtaataaaaaggagaaaaatattgactagtcaagaaattttagattttactacccaagcaattagtgaccgtcatggtgaagatactgaagcttacgatatgcgtggaatcagtattttagctgattactatgttattaccagtgcaggctctaatcgtcaattacatgcgatcgttaactcaattgttgatgcggctcacgaaaacaactacactgactaccgtattgaaggtaccagagattctaactggcttttgctcgatttaggtgatgttgtagtcaacgtctttactaaggaagcacgtgaattttataacttggaaaagctatgggctaacggtaagcaagttgaattgaaggaagattaagcaatgagtgttgttgggattattgcggaatttaatcctttccatagtggacatgagttcttgctaaatcaagcacgcttggttgctggtaatgatccaattgtggtgctcatgtctggtaactacgtgcaacgtggtgagatggcgattatgagcaagtgggagcgggctaaggtggctttgcaatctggtgccgatttggtatttgaaacaccattttcaacggcagtagaaccagctgatctttttgctctcggaaacattgaacaacttgctaaattaggcgtaactgatttagtctttggtgtagaagatgctaacctgaattttgcttatttgggtaaaagaattgcggaaattccccagaatcacatggattttagagattatagccaaacttattcaacacaatacaaccaaatggtagcgcatgaagtaggctatgaagttaatcagccaaatgctattttggggttagcgtattcagtagctaatcataatttaggttcaccattaaacctgcatccggtcaaccgaattggagcaggacatgatgaccttttacaaagagaaaaagttgtccaaagtgctagtgcgattcgaaacttattattgcatggtgaagatacaaaaaatttaaagtattggatgcctaaagcagaagcaatggtgttagctgagcagaaaatttatcctaattggaatttgctatacccatttttgaagtatcgaattgaatcatcttcagttgaagaattgcgtcatatttatcaaatgagcgaagggcttgaatataagatgaaacaagagattcatttagcccgcgattttacagaatttttgcggcatatcaagtccaagcgttatacttattcccgtttgcgccgtttgagcttatatactttgcttaatgtcactcaggatgatatattggctagctttaatcatgagtctttgatgctcttaggctttagtaaggtaggtcgcaaatatttaaagcaacagcgcaaggaatttcagacagaaatcgtctctaaagttgataaaagaagtgctaagaacggctctttagctttacaagttagggtagaccgtttatttgaacaaataatgggcgttgatcaaaactttggtcgacggccaatcgaggtgtaaaaatgttagaacttagtttttctaggattcaaaattccaaggaaccattaactcacattgaacgtgatttggaaatgcgtccagaattttttaagcgtagtaaagatctactaattgatgcgaaaaatgtaaaagtgagcggtgacttgttctatcaagaaccatttgtgactggcagttttcatgtggccgctgatctggttgtgccatcaagcagaagccttaagccggtaaactatcatgaagattttacttttactgaaaactaccttgatcgtaagccaaccaaggaagaattggaagaaaacgatactattgtacaagttgagaatgatcaaattgacttgcaaacagcggtagaagataatattttactccatattccaactactattttgactcctgaagaaaaagaaaagaatattttcccagagggtcaaggttgggaagttgtttctgaaacctcttttgaagaaggcaagaagaaccaagttaacccagcttttgctaaattgaaggtcttgcttgatgggcaagataatgataaggacaataaaaataagtaataaatgtaattgaaaaatatggtggacaatcaaagaaaatttttactttgattgttttttaatcttgtgttagaagcacttttaaagtatcctttaattataaaagcattttttaattaatttattagtattagaaaaccaaattgatctacgaggaaatgaattaacatggcaaaaattctaattattgaagatgaaaagaacttatctcgctttgtcgagcttgaattgcaacatgaaaattacgagactgttgttgagaataatggtcgtaagggattagaagatgcattgagtcaagactttgatgctatcttgcttgacttgatgttacctgatttaaatgggttggaaattgcacgtcgtgttcgtcaagttaagactacgccaattatcatgatgactgcacgtgattcagtgatcgaccgtgtttctggtttggatcatggcgctgacgattatattgttaagccttttgcaattgaagaacttttagctcgtcttcgcgcagtgttacgtcgcgttaaaatcgaaaaggacgcatcaaaggttactgttgctaagcaaaagattgtaaaatttaaagatttgacaattgaaactgctaaccgaattgtgcaccgtggtgatggcaaggcaatcgatttaactaaacgcgaatacaacttattaatgaccttgattgaaaataagaacaacgtagttagtcgtgatcaattattaaacaagatctggggtccagaatctaatatcgaaactaacgtagttgaagtttatgtacgttatttacgtaataagattgacgctccaggtcaaccatcttacattaagacggttcgtggtaccggttatatggtaagagatgaagatgatgatcaagaataaagacgaggaaaaagaggccaagcactcatccctaattgtgcgatgggttagtatcgttgcattaacgattacggtctcttttgtcatattttcagttgttgcctatcaaattgttagtcatcaatcgatggaacagcaacaagagacatctaataatgtagttaccacgatggaccggacattaagttctattcaagatgagctagagatctcaaatgtaattcctgctctgtcaccgtctaccaggcgtattttgaggggcggtcctgctattagcaaaaaagatacagagaataaagcatttagtgatagcctgatttcatcgatttcgaatccagatattaatgtagcagtttacaacaaacatgatgaaattgtttttactaatggtaattctgcacctaagctaaaagaatttgccggcaaccaacttgaagaagtagtaaaccgaaaaaaaggcaaaatgcttttaacctaccagaaaatctattctgaggtaaatggcaaattaactggctatgtagtggtttctaatagtatgacttattacaatagcttgatgagtaatttgcttcattggatggtaattatttcactgattgcaataattatcttcattgcaatttcttatattttggttgttaatgtagttcggccaattaagacgatgtctaaggtggctaaggaagttaatgctgatcctaatagtgaggctagaattaaggaactacatcgagatgatgagttagaagaattagctacttcgattaatcaaatgctagaccggatgcaaggttacattgagcaacaaaagcaatttgttggtgatgtctcacatgaattaaggacaccagtggcagtaattgaagggcatttgaacctgcttgaaagatggggcaaggatgatccgcagattttggatgaatcaattaaggcttcgttgcaagaagctgatcggatgaaacatttaattcaggaaatgcttgatttaactcgagccgagcaaatcgatgttcaatatccgtatgaagtaagtgatgttaatgaaatcatccgcagagtggtcgctgatatggcaatggttcatcctgacttcaagattcagctggatgaggatgatttacctgatgatacagagattcaaatgtatcacggtcatttggaacagttgctagtaattttgatcgataatgggattaaatattcgactgatcgcaagcagattaatgtttcagctggtgtaactaagaagaatgttaatattattgtgcaagactttggtgaggggatttctgaagaagatcaaaagaaaatcttcaatcgcttctatcgtgtggataaggctagaacccgtgaaaaaggtggcaatggtttaggtctatcgattgcacaaaaattagttgctagttataacggaacaattagtgttgaatctgttgagggtcagggcagccagtttaaattgaagttccctcggttgactaagaaaaaagccgctaagttaagaaaattaaatgagaagaaacaaatgcctaagagcaatcttgaggcataaacaaaatcctattaaatcaaggtttgggtaccaagatttaataggactttttttctctagaggcttaggtattagaaaataagaaataaaatgcttcgaaaataattataatttttattaatttaagcgatataattagctaaaaatatttaaagttaagggatgtgacataatgaaagaacgcattttttcaaggaaattttggcagaaagtttttaactatcaattgattatctggtttctcttgatgattagttatactttttctcagcggaacaatcatttttattttataggggatttgttcaatctagcttttagtacggcgatcatgggattgaacttttacgtgcaatttaaaaaggattccagcaagactaatactcaaattgttcgctggctgaccatagtaatttttgctaaatttggcatatcactgggaatttcttgctaaaaaacctgccggctatcgagattctattagtattactgctatgggcggtttatattttcttgctagttccaattgcagttgtacatgttggaccgattaaaaattggtttttacgcttgctaactatttactttcttgatattcagtacggtgatgcacaaaatttagcaataaatccagatttttgctggcttcattcacttacttatcaaggtgtaatcgcagctattgctttattaacgatgacttgtttcttagttaaagcttggggctatcacttcaatccaaacttaaaatttattaaaagttcaagctttcagaagaagatcttgctggctttattgatcatggcaaccattgatttgttttacaatattcctaatttaactgcagccattgagctcggaattttggaagaaaccgaacgctatttattgatcgtaatttttttagctggttttaatagattcccaaagtatcgcatccctgttgcaatctatggttcagcaattttgttcggccttagtcatttaagtaattttggctggcatggagaaagttttactgcaacaattgcacaagttattggcgtaatggggagcgcctttatctgggtagaattgtatctctatacaggaaaactatggttgccgatgatctatcactttttaatggattatatttctgatttgcaatctggttggaattctgctggctggtcttggaatggcgaaatcactgattatatttatactgtattaattgttggcgttccattgctattctcaatttggatgcttttcggtaaaagaaggcaagtaatggaagataatgcagatttgattttggatctaaacggtaggcaaagcatgatttagcagtgacttatattaaagggactataatgtatatgcaagggtaaaataattaagagaggtcataaattatgaaacttaagagaattgtattaagtattgtggctggaactgcgcttttggttcctgcagctttagcgggtcaaaatcaattaacaccggtagttcgggcaagtactctgaagaataagattacaactgttaagagctataccaatccaactttgtataataagaatggtaaagagctaggtagccaagatcggataaattttaagaaaccgatcagtttttatgggcaacctattgttattcagggacccagggtcaatgcttttattaatcttaatgggatgccacaagctattgttaatggtgaaacctatgcagatttaggtgatggtggttatgtcaacatgaaatcggttggtagctataactggaataataatgagatcggaattattaaaaacacctatatttacaatagcaagggtaatcgtttatcaacttatcgcggtggcaaggcttatttaactaaaggtagcaagattaaatatgctggtaaaagttggactacttatcctgattcatattttaatttaggtgatgggacgtatttaaagtctaataacgttaataccatgaatggcaaaggcgttttgaagctgaatgctaacactgctatttataataagaatggcaagcgtattagctttaatggacaacaggtttttcctaaatactcaattataaattatgctggtaagcgtcgcactaagacacaaactgacgattactattacacaaacttaagtgggagtaaatcatatgcaattaagaattataagattaaaggtcaagactattattacattggcagaggtgcttatatcaaggcaatgaatgttggtcgcatcaatggcaatccggtatttcgtgatggcggtgcaactacgattgttccgcagacagatttgtacatctataattctaaattaaagaaaaccaaacaatctgttaagaaaggacaaaagattagagctttagatccagttgttcttggtagtggtgatattgcccaactattttacagaattaagggaacatctaactatgtttcctggggtgattatagtgagtatggttttgaagatgatgagcacgtgggctacttcaactttcgtgttagattaaatcctgttaaaactattgaaaatgccgctacacgggccgctgaagaatcagattaattgggagtgaagacgttatccatttggatagcgtttttattggattatgaaaaagaattaatctgaagtgtctaggaaaactctaaaaattgaaaactcctactaaatcttggcataataagccttgatatagtaggagttttgttttgagttaaagccaaaaatcgattaaaaatagctttttctcagatacaaacttaattttttctatagagatctttcttcaaacaaatgaccataggaacttaaaattctagctaaatccgtccaagtaagactgatagttttggtattatcattgggatggacgccaacataattattttcctccatggccgcttggtctacaatcaagggaatagtgttgctagaatcattgagtaagttaaagggtgaaaccgtaccagatttaaccttgagtttttcctcaagttcatcttctgaagcaaaagttagactaggagaaagtaattcactttgtgcttttttccagtcaacttttttattctcaggcaacatgagtaaataataattttttccgttacgcgatttaataaaaagagtcttacatttagtaaaatcttcatttttcaagtatttatctgcttctttagttgtataaactgctggatgagaaaaaacttggtaactaatatcgtgatcatctaaaagttgtaatatttcttgagtatgcatattttcctcctaataaaaaagtcaggattttactcctgactgataactatttacgcttttgcttacctttattacggttacgtaagtcttggtgtagttctttcttagcttcagttgtagccttgctttgaccgctattggagttaaacaaagcatccactttttctttagtaacaacagtttcaattggcttatcttttaattcatcggcaatatgcttcttaacactaggtgtaaggacaaaggtaacgattacttgttggacaatcattactaagttaccagcagcccagtaaagagctaaggcaccagagaaggataaactgaagaacaaagtcataattgggttaacaatcatcattgattgcatggtcttcttttgttcttctggaataccaattagtgagatataaccttgaataacggtaaagacagtcgcaataatggctaaaacaacagatttggaacttagagaaataccaaagaatttggattgtgccaattgaggtgaatagaataccgcttgataaattccccacataattggtaactgaataattaatggcaagcagcccattccaccagttaatgaaacttggtttttagagtaaagctctctttgccaagttgataaagtcatttgttggtcaggggtgatccccttgtgtctcattgcattttgaatcaacttcatttgcggttgcagacgagccattttttcctgttgacgtacactcttgttttgctgtactaacatcaatggcatcaagattacacgtacaactaccgtaataatcacgattccccaaccagcaccattatcgccgccaatcatttgcgcggtttgaatcatgatattttgtaaaggtcggcctaaccattggtaaacccaaccgtaaataccgctgtgcggtgcaacatgtggatcagttgttgccccacaggcacttaatacaagagtagctactgctaataaagccagtactccagcgtatcttttaatttttttcatttaaataaatcaccacttaatttctatctaaaaatgtatgtctctaatataatacatgaaaatcatgcattttttctacacctggaaccgattcttgactaatattttgaatttgggcaaatccagatgcagtaggtagtttttcaataaagcggtcgattttatcactgtctgcttgtaaatagattgtaacggtaccatctgcattatttttaacagtgccaggaatacccatcttgttagctaatgccatggttgaccaacgaaagccaacgccttgaactaagcctgaacaaattaattttcttgtttccatttttatctcccttatttaaattaagttcaactttgattttagcatgatcaaaatagattatcagttataatagattttgaatacaaaaaggagaaaaatatgcaacaaattagttcagttaataatgcaacgattaagaaattagcgaagttaaagcaaaagaaataccgcgatgatgaaggcttatatttaattgaaggctttcacttatttgaagaagcacttaaagctggtaaaaaatatcagtatatcttaggtactgaagaagcacttgatcaagcagatagtgaatatgaagttaatttaagtgggaagaatgtcgtattaattaacaaagcgattgctcgccacttaagttcgactaagaattctcaagaaatttttatggtattaaaaattgatcaaccaaaagaatttccgtttaattatggcaagtgggtgctgcttgataacttggctgatcctggtaatgtggggacgattatcagaactgctgatgctgctggttttgatggggtagttctttcaccagagagcgctgacctgtataatcctaaaacgcaacgtgccatgcaaggaagtcaattccatatcgatttgattaagcgtgatctagctgatgtgatcaccgattttcaggatgcagctattccggtttatgcatcgctgcttgatcgttctgctaagcaattgcctgatttcgaaaaagtgccacaacttgccttaattattgggaacgaggcgcatggcataagcaaaacaattgcttctttagctgatgaaaagctttatattccaattaaaggacaagctgaatcgcttaatgccgctgttgcagcagggatcatgatctatcactttgcttagcacttgtaattagtaagtagatctactataataattttagtaatactaaaaagtattttatataatagtatttttactggaattatataatacggagggacttacctatgcaagaagttaaagagaaaaaggacgcagctccttgtaaaccagaagattatgaattatgtggtcattttgttagtgcgtttaagattattggcaaaaaatggaatggcttaatcatcagttctttgtgtgatacacaagatatgcgctttaaggacttggcacgaactgtcgaggcttgcagcgaccgtgtcttagttgaacgtttgaaggaacttgaaaaggacgatattgttaaaagaagcgtcgatcaaagtaccggtattatttcatatggtttgactgaaaaaggtgcggaacttaagcctgtttttgatcaagtacataattgggcagataaatgggcttaagctattgacattaagtaagcatagaagtatattacttattgtaagttgcttatttaaaataagattaggtgaaaggagtacgaaaatgaaatctttaagtatgatgaatgttaatactgactgttgttcttgtgtatctaacattatttttaatactcaagaactcagttttcgtatttccgaatagctttaatccagagatcaaaaagatttacgttagctgaaaagacgtagatcttttttatattgtttaaagagacctatgggagtaggtctttttttgtatgattgggggatttttaatgaattggacagttatccagcaagctctaccaatatttgcgcgcggctttgaactgaccttatggctttcattgattggcattgttggctcaattatcgtgggcattattgtcagcttagtacaatattttaaactaccagtactaagtcaaatttcaacggcatatgtcgagctagctagaaatacgaaactgtcaaatcttttgtgtaaatagatctttctcgtaaattgattttttaattatttatttaatcaaagtaggattctaaggtgtcctgaacctgaccaaagcctttatgaattcgattgaaataacggtcattgtagctcattgcctgaatgccaataaaagcatcaagcgactgttcagttggaaactctgccttaggcttagctttgcgcttgatcacattgttaaatgattcaatcatgttagtcgaataaattgaagctctgatctgcttgggatagttataaaagaccagcagatctggttctatgtctttcaagcttctgataacatggctgtaaaccttgccccatttggtatagaagtcatgcaggacagctgtggcttcttctttgtttgtctgttgatgcacctgtttgaattcgttcatgatcttttcacgatcgtcgacgcgtactttagcgcagatattgcgcatgacatgaaccaaacagcgttgaaaatgagctttaggataagtcctggccaaggctgttttcatgccaacaacaccatcagaaagaaaaagctcaacttgctttaagcctcgggatttcatgttttgaagcatatctgtccagacttcaatgttctcgctaggtgcaatgcagtagtcaatgacctccttgtgcccattaggcttgatgccaatggcaatatagactgcttcacgctcaaatgtttctcggcgcaaaggaaggtatgtcgcatccaaatagacgcagaaaaacttgtcgcttagcttgcgtttgtggtaagcctcaacctttggaatcatctgcttggaaatatttgatacctgagctggactgtaatggctgccatacatcttttcaattagatcggctatttccctggtggtcacgcccttggagtaaagcttgataatcatgctttccaagatatccgagtgctgcttgtagtcaggcagcgtgtgctgatgaaattgaccgttgcgatcccgaggcacttgcacttcaattgggccaaattgcgtatcaactttgcggaaataagcaccatttctagagttgccagtattccagccatttctggcatagggatcatagcccagaaaggcagtcaattcagcttctaacaagttattaacagcctgttgtagctctttgcgcaataaatcatttattttgtctggattgaatagagcttgagcaaaatctttggtaaaatcattcatgaaggagttcttctttctgtatgtgtttttttgttcaaaccaatcatacgagaaaggaactcctttttctaatgtttaaagaaataaatttaaggaatcattcatccttacacaaactattttacagtctcagaaatacaccgcttttgattcaacttttctttttgtattatgcttttccagtaattggcttaaaaatgtcggcagaagtctgcggcattatcggtttgattttcttaggcggcgcatatatggctgaaggctttactggtggctttaatggtgtgaatcctagtcaaattagtagcggtaaggccttgggaatgaataattttcaactagctcgttatgtggtttttccacaaggattcagcttaagtatgccagcattaacggctaatattattttcttaattaaggaaacctcaatcttttcagtaattgcaataccagaattgactaacactgctcttgacttaattggaatgtactatcggtcaaatgaatacttactgatgttagtagttgcatatgcaattattttgattccggtgattttattattaacttggcttgaaaggagagtacggtatgcttcattcggggattaatgttttatttgaagggagtaactttgctcgcttgatggcaggactatggacttcaatttggattgcggctttgtcattaattatcggcttagctgtgggtacaatttttggtatcttaagaacgctcaaaaatcgaccgattcgctttgttttgcgcctatacctggaattctttaggatcgtgccaactgtagttttactttacttagtttattacatcttgcctagaagtttgcacgttaactggccagcaacttggatggcagtcttagccttttcaatgtgggtagccgctgaatttagcgatatcgttcgtggagcactagaatcagttcctaagacgcagcgtgaatccggcttagcgttggggctaaatcgcttgcagctatttcgctatgtattattgcctcaagcggtcaaattagaattgccagcaacgatcaatttggctactagagtaattaagaccacttctttgttaatgattatcaacattatggaagtgatcaatgttggtcaacaaattatcgaagctaataaccaacaatatccagcaggcgttttctgggtatatggttttatctttatcttgtactttattttagattatccattatctgcatgggcaaagcgtttaaccgctaaaaattaggtgaatgaaatgacagaagaagttttaagagtagaacatttaaataaattttatggtaaacatcagaccttgtttgatattaattttagtttgaacaaaggtgaagtattgacgttattaggaccatctggttcaggtaagagtaccttgcttagaaccttaaatggcctagaagaatatgaagacggcgcgatttatttccatggcaaaaagattaatcctagtccaaaggaatggcaattattgcggcagaagattggcatggtttttcagagttatgatctgttcccaaatttgaccgtaatggaaaatattttgctggcaccggtgaaagtgcaaaagcgtgatgaagacgaggttaaagaagaagcagtcaaattactaaaacaagttggcttgtcggaatatggggatgcgtatccgcgtgaattatctggtgggcaaaagcaaagagtagcgattgtacgagctttagttatgcatcccgaagtaatgctttttgatgaaattaccgcttcacttgaccctgaaatggtgcgtggcgtgttagatattatgcaaagattatctgatgatgagcatatgacgatgatcattgtaacgcacgagatgaactttgctgctagaattgcagataaagtattgtttttagaggatggaaaaatcttagaggatacaccaggcaaggaattctttgccaaaccgaaaacgaagcgagcacaagaattcttagaaagtatggatttttaggtgtgaacaatggcaaaaaagatttttaactggattatggctatcctattcgtagtagtagtcttggttgcaggctatattggcattagccggccaggcatcaatggcactgcttcagaggatagatggaatagtgaaaataatgtttcttcaattaaaaggcgtggttatttaagaattgccgtttttggtgatttgccgccatatggctgggttaattcacaaggtaagcgtgttggttatgacgtgcgtctagcgcgcagagtagctaaggatttgggtgttaaacccaagtttattcaggtaaatgccaataaccgaattgataccttgaattcaaataaggcggatattgttctagctaacttcaccttaacgcctgaacgtaaaagtgtggctagttggaccaaaccatacatgaaggtatcagtcggggtaatttcaccaaagtcagctcctgtaactaatgctaagcagctaaagggcaagagtgtaattgtgactaaaggtacgacagcggaaaattactttactaagcaaaaaggcgttaacttgctgaagtttgattccaagacccagcagtttaacgcaattaaaaacggccgtggcgcagctttagccgatgataattcttatttgtatgcttgggttaagcgtaatcctaagtttactgttggaattaaaactattggccctaaccaatacatctctggtgcggtgaagaagggcaacaagtcactgcaaaaatggatggatcgtgaaattactaagctgaaccgtgagagcttctttacttatgattataataaagaattgaagccatactttggtaaggaaatcagacctagtgacattgttttgccgcagggaaaataaaaaacttgcaagaaacaagtaaaagaaatatgataatagttaattactaagatcaagactagtaacagattatttttctaaagagagtcttctttcaaaagctgcaagagaagatagaaaaagtctgtgaatttcatcttgggagtaggatctaatcaattccggtatttcaccgttaacgaaaacttaagtgtgggcgttgctacgtccaaactagggtggtaccgcgacgcttcgtccctattggagacggggctttttttgttttgaaaggaaagatttaatggacttatttgataagttaaaagagctccatgaagaagggcttaagcaaatcaacaaggctaaagacgaaaaaactttgaatgatgtcagagttgaacttgttggtcgtaagggcgaattaactaagattttgcactcaatgcgtgaagttgcgccagaaaatagacgtgaagttggtcaaaaggttaacgaattacgtgacttgtttaatgctcaattagatgaagctaaagaaaacattgttcatgcaatgttagttaagaagcttgaagatgaaaagattgatgttactttaccaggtcgtgaagcacatcttggttcaaagcacccaatcaacattattttagatgatcttgaaagctactttattggtatgggctatcaagtagttcaaggtccagaaattgaaactgatcactactgctttgaaatgatgaatatccctaaggatcacccagctcgtgacatgcaagctactttctacattgatgatgaagatttgcttagaagtcagacctcaggtgatcaagctagagtcctagaaaagcacgacttctcaaagggtccacttaagatggtgggaccaggtaaggtataccgccgtgatgacgatgatgcgactcactcacaccaattcatgcaaatggaaggcttggttattgacaagaacgtaactatgagtgatttaaagggtactttggaattaattgccaagcacgtttttggccaagatcgcgaaacccgtcttcgtccaagttacttcccattcactgaaccatcagttgaaatggatgtatcttgctttaactgtaatggtaaaggctgccctatttgtaaatacactggctggattgaagtattaggtgctggtatggttcaccctaatgttttggaaaatgcaggtgttgactcaagcgtttacggcggttttgccttcggtgttggtcttgatcgtttcgctattttgaaatacggtatcgatgatattcgtgacttctacaccaatgacgtacgtttcttagaacaattccgtaaggaggaaagataattaatgttagtttcatacaattggctaaaagattttcttgatttagatggtcaagatccatacgaattagcagaagaaattactcgtagcggggttgaaattccagaccgtgttcatccaatggatggcttgaagaagttagttgtcggccgtgtccttgattgtgaaggcgttgaaggtactcacttgcacttgactcacgttgatgttggtgaagacgaacctttgcaaattgtctgtggtgcacctaatgtagctgcaggtgaagatgtgattgttgctcttcatggcgctcgtattgctggcaatgaaaagatcaagaagggtaaaatccgtggcatggaaagttacggcatgatctgtggtttacaagaaatcggctttagcgatagcgtggtaccacaagaatttgtcgatggtatttacgtattcccagcagatgccgaagttaaacctggtcaagatgtatatgaagcacttggcatggatgattacattttgaacttcgacattactcctaaccgtgctgatactttaggcatggaaggtgccgcttatgaagtcggtgctattatcgaccaaaagccaaaggttgaagaaaaggttgtcttaaaagaagatggtccagcctggacagattcactcgatgttaaagttgatgaaaagcttgcacctaagttttacttacgtaagctcgagaatgttaagattcaagactcaccactttggttgcaacgtcgtctttggaatgcaggcattcgtccaattaacaatgtagttgacgttactaactatatcatgctgttaactggtcaaccaatgcatgcttatgacgctaagacttttgctaacggaaagtttgaagtaagacttgctaataagggtgagaagcttactttgcttaatgaaaaagaagttgaccttgaccctaaagatatcatcattaccgatggtaaaaagccagtaatgatggctggcgtcatgggtggacttgattcagaaatcacatcagaaactaccgatgtcattcttgaatcagccatctttgatccaactttagtcagaaaggcagcacttcgtcacgctaaccggaccgaagcttcaagtcgctatgaaaaaggcgttaactgggatgccactgaaaaggcaattaacatggctgcgcttttacttagaaatgacgctgacgctactgttgatgaaggtattcttaaggcaactgaccaaaagcgtgaaccagttgtggttaaaactactgcttcatacctcaataaagtattgggcactaagttatcagttgatgaaattgtaaagatttttgaccgtctttgctttaaggtagatgttgatggtgataatttagctgtccatgtaccaaatagaagatgggatatttcaatcccagccgacttagttgaagaagtaggccggctttatggctatgacaaccttgaatctactcaacctgttttgccagaaactcatggtggctactcagaaaaagaagaaatgatgcgccgcatgaaggcaattgttgaaggacaaggcttgatggaagctatttcttactcattgacttcacctgaaaaggccgttcgttacactaaggatccaaaagaattagttgaagttaaatcaccacttaactcaagccgttctgcaatgcgtgagaatttgatgactggattggtagatgctgctagttacaactttgctagaaagcaaacacaattagctttatttgaacaaggcagaacttatgaccatgatggtggtaaattcaacgagcatgaacatttagcagctatttactctggcaatacttttgcggaaaattggcaacatttaacccaaaaggtagacttctactttgttaagggacagttaaccaatttgttcaatgcaattggtattgatcctgaaaaagtggtttatgaggctaaaggcatcaaggggatgcacccaactagaactgcaggaatctacattgataagcaatatgttgggatgatcggaatgattgctcacgctgtaacgattgctgataaggcacttcgtggtagcgagctttatggctacgaaattgatctcgatacaattattccaatgttaactaagggcgtaactgcagtgcctgcacctaagttcccagcaattcaacgtgacctttcacttttagttgataagccagttactaaccaagaaattgaaaacgtcattaaatctaatgctggtaagtacttaactgaacttaaggtaatcgatgtttatgctggtgctcacattgatgttggtaagaagagtattgcttacaacttaaccttcttgaacagaaaagatactttaaccgacgatgttgtcaataacgcgatggataagattgttgctgctcttgaaaatgatcttgcgattaaagttcgttaaaggttgacattattgacgtaaattaatattattgatcaatgcaagataaagaaaattaatttctgaggagttaaaaatatgcctgaaaaatcttatccaatgactgctgaaggtaaagaaaaacttcaagcagaattaaagaacttaaaattagttaagcgtccagaagttattgaacgtatcaaggttgcacgttctttcggtgacttgtcagaaaactccgaatacgatgcagctaaggatgaacaaagtcaccttgaggatagaattgctcaagttgaagaaatgcttaagtatgcacaagttgttgatgcagaaagcgttgatcctaacgaagtttcagttggtaaaacagttacctatactgaagttggtactgatgatccagaaacttacactattgtaggtagtgatgaatcagatccattgaatggcaagatttctaacgattcaccaattgctcaagctttattgggcaaaaagaagggtgaaaccgtatcaattaccactcctggtggcaagtttgacgttgtaattaacgaagttaaagcctaataataaaaagggagggtagctatgactatcttcctttttgtttttttgaaaggattttaaaatgagaacagttggtattattggcatgggccatgttggtgcaaccgttgcctatactttatttacgcacagtatggttgacgaactgattttaattgataaaaatgaagctaaagtaaatgctgaatacaatgacttgcatgatactttggctagaaatgatagctatgttaatgtgcgaaagcaagattgggacggcttagaagatgctgacattattattaccgcttttggtgatattgcggcttcagttaagacaggcgaccgctttggtgagtttgaattaaatgcaagaaatgccaaagaagttggtgcagatattaaagaatcaggctttcacggcgttttgatcaatatttctaatccatgtgatgcaattacccaaattttgcaagaaacttctggtttaaagaagaatcgcgtctttggtactggtactttccttgatactgcaagagttcaaagaataattggtgaaaaacttggtcaagatccacgtaacgtagaaggtttcgttttaggtgaacatggttcttcacaatttacagcctggtcaacggtaagagttaataacaagattgctttccaattgtttggtgatgaagaacaagaaaagattagtgaacaatcaaataagaattcctttattgtggctaagggaaagggctatactagctatgctattgccacttgtgctactcgtttagttcaagcagtctttagcgatgctcatctatattgtcctgtttcagtttataatcctgaatacaagacttatattggttatccagctattattggtcgcgacggcattgaggaagaaattgaattaaagcttacttctgaagaaaaagaaaagttgcaagctgctgcagataagatcaaagaacacttgaagcaattgaagaaataaaaaatagtcattataaaaaaataaggcgagaattacagtcattgtagttctcgtcttatttattgcttattttagttttacatcccaagcggcaatttgcttgttgccgtagtatttcttgtaaatttgcttggtctttttggtctggtatgctttaacaatttcttgataaatctttttatttttatccttggtgcgggcgcaaataatattgatccattgctcagagtctttgttcaatggttcgacaaagatagtttgcttgtcacctagatgtgcagggccagcaaagtcattgttgacgacagcggcatcaacatcatcgatcacgcggctagtttgttcagatgcaacttctttaattttgaagtggttaggattggcagtaatatctgcaacagagaccaatactttgcctttcttcaatttgatcaacccggcatttttcaaaacaaaaagtgctcttgattcattggtgggatcgctggggaccacaattgttgctccttcaggtagtgcatttaggctatgatattttttggaatataagcgaataggtgagatataggttttaccgattgcagtaattccgccatggttggctttgttccaggcgttgaggaaagcatagtgctggaaggcattcagatcaacgtcaccggatttaagtgccttgtcaggttggtcataaccatcaaaacttttagtggttaaaataatcccatatttctgtttgacggtttgagcaacgcttttccagattgcaatgtcacctttgctggcaccaacgattcctacgctaactttggtttgaccgttgctttttggcgtccaaaagaagctgaagtaaccagctacgataatcaataagctaacaatggtgccaataataatattccgctgtcttctttttctcatttttctttctctcatatgcaaaaaaagcacccatcctcaaaggacgagtgcttcgtgttaccacctttatttgccagctatttacataactgacctcaatagctatctaacaatagcttgcattgttaacgagagcaaccccgatactagctaaatatcactagtataatcattctgaatccatcttcattaagtagtttcttttacttctcaccaaccagtaattctctgtaagaaagctagctataattactctattcatcaagattttttaattattgctattaatttatcatctcgttttaattttgtcaaataaatttttttacttagttaaaaagttagtaacggaagaaatagtgagaaaaagtttatttttgtcgattaacaaagtagtaaatgagtgagataaccgattcagccaacatcccaccggccatccagtacattgccatcatcattttgccggtaaaagtaaagtaggcagtaatggcgtaaacaattacccaaataattttccaaaataagttattcattcctgagcacattttgaagctcctttatttttgactagtaccagaactgctgtcaacttccatgccgcaaccttcggtatccattcctggcatccacacatcttcaggtttaatgcctctttctttagcaaaggcgtcggttaatgtcttcatatccattaacttgtatgtctttgggtgtttagggtcgaatacttcgatttgagccatcattccggcatcttcgtgttcaataatgtggcagtggtacatgaagactccagtttgtgggaattctacacgcaagcggacggtttcacctggtctgacaggaatggtgtctttgtaaccatattcatttggaaatggcttttcgccatcacgtgaaacgactgtaaagtgtgtgccgtgaatatggaatgggtgcaacataccgtgttccttagagttggtattagttacgtcccagtattcagcatgactaacttgttgcttcatatcgatccgctgcattgcgaattgcttgccgtttatcttgttgtgatcatccatagttactttacgaactggcaaatcttcagcgatttcaggaatttctggtttgaataatgtatcaggaataacactgttgtcaggtgcaaacttgtgaattctaaattcaattagtttgaaatcatcagtataaaggttaacgacatcgccatcatggtaatccttgaagtcaactacaacttgaagccgttcaccaggtgttaccaagatcttagtcattttgattggatgaggcaaaaatgaatcgtcacctgcaatttgagtcataactaggtcatcatcaaagtgcaagcgccattcacgacggttagacccacctaagaatagtaaacgaatcttttgtgttgttacatcaacataagggcgaaccgtgccgttgattaatggtgtttcaccgaagacgcccattgcatcataatcagcgcgatagtcaagttgattatctttgtggaaagtacgatcttgcaaaataactggaaactcgtcaacgccatagtttttaggaattgggagtttagcttcgttttcatctgttactactacgcccatagctaatcccatccaaacttgggcagcggtggatggacatgggtgagcatgaagccatgttaaggcagctggttgattaacagtgaattcgatttgcttttcttcacctggataaacaggggcatgacagccaccatcagtaataggaccaggaacttccatgccatgccagtgataagttgttagttctggtaaactgttttttaaggtaacgtgaactcgctggccacgttttaagaccatggttttacctaacaaaggagcgttataaccccaagtcttggtcttagctccaggcaatatttggctttcgctttcaattgattcaagagtgaaccagacatcagtatcagtttccttatccggtgcaaggactggagggacagctaatggctgagcttctacaccttgagggatgcttaatttcttgtagtggaagtggtttttgtcaaaatcttcatcttcgataaagtaattagtgtatatcttatctgtcatcttattaacaccatcctcgtattatataaattgtaattagtcatattgtgataattaatcaaattagtatttgctttttgatcttcacatgttagcctctaattgtcattggctttggtcaactggtctaggttatcacctcctgcagttttgtctgctttataagtctgccacccagacagttcctttatgctctaactcacatgctgtattgattgcttctttttgctagtccttgagcaattgggattaggtgcagctttcaaagaagcaaccagtgaatacttatactggcgagattgaacttaagaactgtaattaggggttaacatgtgaagatcaaaatctatgatcagaaatttgaaagaaaggaggccatttccaatgaaattatttgtcggtattgatgttagttctaaagatttacaggtcgttgcacttgattcagaagatcaaaacaaacgcttaattaacgatagctttgtcaatgatctttatggtgctagtgaactgaaaaaacaaattttagatctagctcaaaataaacactatgatcaaatcattattggcatggaagctacatctatttacagttttcatcctgcttactttttccaaaatgacgaagatttacaaaagctcaatgtagagactgatgtaattaaccccaaagaaaccagcaggtttcataaagtctttgaagaaagtaaaactgatcctctcgatgcttattacattgctttgtatctaagctttggacattatcgagtaagcattgccagacaagacaactatcttgctttagagcgtttaacgcgtaccagatatgaattagttcaagaactgactcgtaccaaacagcacttcattgaagctttatattatcgggttaataaactaatcactgtcgataaagataagattaatactcctcttttcggtgctacaatgatgtctattgtaaccgatagtaaaactctggatgagatcgcggatatgcctaccgaagacttaatttcttacttacaggttaaaggcagaggacgcttttccgatccagataccttggctaaagcaattaagaaagctgttagaggttcatatcgcttaggcaaagtaatgactgattcaattgatgcagtgctttctgttcattacaacatgattcaaagctttaatgaatctattaaagatctagaaaaagcaattgatcgtatcgttgatgcattaccagaaagcaaaattctggaatcaattcccggtattggcaaaacctatacagctggtattatcgctgagatcggaagtatcgatcgctttgataaagaagaacagctggctaagtatgccggcctaacctggaatcaatatcaatcgggagatcacagcaacgaacatactccaatggccaggactggaaacagatatctaagatattacttgattgaagctgccaatctagcaagattacatgatcctgttttcaaaaaatattaccaaaagaagtatgatgaagctgtctactcgccgcataaacgtgcttgcacattaactgcaagaaaattagtacgagttatctttaaattgctcaaagatgacaaactgtacaggacaccgaggtcttaatttcaaaaattggtctaaatttaaaagtaaacaaaagtttaacattaaaaaaatcaacctttaccaaggcttagtttcatatactcaaatttatgatcaaaaagaacaaatatcatcgcctttcatttgacttattaccacatgacttttgacactaacttagcatgattttttaccgttttcaaggcgcaagaacgctgttatttaaaggcttgcatgtctattataactatgtaatgaaaaatatttttactattttgtaatcgcttatacttaggtgaattatgttattttacaagatttgttgccttgctaggcttgcgtgtctccggtaaactaagcatgaagaggtgactagatgtataaaattattgcgtgtgacttagatgaaacgttgttgagcgcagatacgcatgtctcagtagaaaatagagaagcgattcaaaaagcagttgctcacggtgtaaaatttgttcctgcaactggacgaggctacgtttctgtccaaaatactttaaaggaaataggattagagcaggcagctaatgaatatgtgatttcattcaatggtgccagcattacagaaaataagaataatcgcgtgctgtattttgacggcttgcctaatgaaattgcggatcggttatatcggcatggggttgaactagatattgccatgcatgtttacactcaagatatggtatatacgtatcatatcgatgatgatgaacgtgcctatatgacgggacgacaccagtttaaagagattgaagataaagacttgtcatttttggaggggcagaaaattgccaaggtgctctatgagagtcttgataataattatttgcaccgaatcgccgctgaattaggaccaattacgcaagaattggatatttcatattcatctaatcgttatttagaatttaaccgtaaaggtgtcaataaaggcgcgggactgatgaagctggctgagcagcttagggtgccgattgaagaaacaattgccattggtgataattttaatgacttgtcaatgattcaggctgctggtgtgggtgttggtgtggctaatgtcaatcctgctatgaaagagcaatgcgattacattactcaggctgataataatcatggtgcagttgccgaggcaattgatcattttatttttaacaattgaaaaaaataaaaaaataattgacagattaaaaatacatgatattattgtttacaacaaataaaaaaatgagctttgataaggaaagtaacttaagaaatgatttgcagagagtcttcggttggtggaagaagataatgatgaattaagtgaaaatcacctttgagctgaaagtgcgatattagcattttcagggtccgccctctatagcggcgacgtatcgctgattttgatagaatcagccgcacgtgcatgaggtagaatttttgtgagtattattctacgaataaataggtggtaccgcgttgaagacgccctattagatcaattgatctagtagggcgtttttttattatcataagcttgttgttaattttttgacttatgggagagataaaaatgagaaaaacattgaagcacttatttggcacgactgtagtagcacttttaggcgtaagtactttatctgcatgttcatcaagccaatctggtgctaaagcacctaaacaagaattgacctggatgactacctcagaaatccaaactatggatccttcaaagatggtagatacaactggtagtgaacaggcatctaatgtttttgaagggctcaatagactgaataaagcgggtaaagttgtatctggtgtggctactaaaactaatcagagtaaagatggtttgacctggacttttactttaagaaagaatgctaagtggtctaatggtgatccagtgaccgctgaagattttgtttattctttaagacggacacttgatcctaagacacaatcacaacagcaaaatgagtggtcaaatgtagttaatgcagatgatgttttagctgggaaaaaagctccgtcgactttaggtgttgaagctaagggtaaatatgaattggtagttcacttgaaacatcccgtaccgtattttaaagccttgtcagttggttggaatccgcaaaataaacacgtagtcgaaaagtttggcaaaaaatacgggactgcatctaagtatatggtttacaatggtccgtttgttcaaaaaggctggactggttcaagtcttaactggaagttagaaaagaatgatcaatattgggacaaagataaagttaaattgcagacggttaattatagtgtacaaaagacgccttcaactgattacaatctgtatcaggctaacaaattagatggtgcctatcttgatgttcaggcttcaaagagactgaagggtcaatctggttatacagtctataaactagatagaactgaatacttgactttcaatgtatccaagcatccagaactagctaatgtcgattttagaagagcagtttcaatggcacttaaccgagctcaattggctaaaacagttggtggtgctaataccgtagctcgaacttttgctggaccaaatgaatatgttgatggtaagaattttgaccagtatgttgaaagcaaaaatccagctaataagtatatgaattataaccctacaggcgctaagaaactttatgatagagcattaaaagaattgggtaagaataagttggcctttaccttaatgggtgacgatgatgacgtttctaaaaaggttttagagtttgtgcaaagtcaattagaagatacctttggcaaaaaagttgatgtaactgttagaagcatgccgaagactactagagttaagaaaatgctcaatggtgatttcgaggcagtctttactggattgacttcgggctatttagatcctaattcacaattgcacacaatgatgacaggacaaagttataacttcggtaaatggtctaacaaagattttgacaagtatatgaataattcagataaggaattaaatcctactaagcgattagaagatttgtataatgcagaacgtgttttaactgatcaacaaggattgacgccattattccatgatggtcaagcttggatggttcgaccaagtgttaaaaatgtagaattcttgggtggtaatttcagctttaaggatgcatctgtaagtaatgattaggagaaaaaataatgactaagacagcttttttaaattgtaatttattcgttggtaatgaagataatctagtagataatgcttggtttgtcgttgatgatgaaacaggtaaattgaccgatcaaggtaagggaaaatgcacagcagattttgacaaacaagttgaccttaaagggaaatatgtgatgagcggtttgcttaattcacatactcacatggggcttgattctgacttgaagaaaaaatttccgactactgaagcttctactacttatgcagcactgcgggatctgcgtgaagctttacaaactggtgtgacttatgttcgtagttgtggcacatcctttgatgttgactgtaaattagtgcagatgcgcaagcagtatccttttgaaggtcctcaagtgatgccaactggaatggcaatgtcaattgtcggcggacatggtgatttcaaggtggggttaaatggagagcaaaatgctagtcatttggttaacggtccagaggacatgcgtcgggcagtgcgtgaacagtttgccaagggtgctaaaaatgttaagctgatggcaactggtggaattatgtcattaggtgatgaagttgatgatactgaactttctcttgaagaaatgaagatggcagtagaagaagctcattctaagcatatgacggtttgtgcccatgctgaggggagacgcggtattcattatgcggttgttgctggtgtcgactcagttgaacatggtttttatctggatgaagatgatttagccttaatgaaaaagcaaggtacttttttatcaccaacattgactgcaggtcggacaatcgtcgttcatggaaaagatgttgtacctgagttctcataccgcaagatgtgtgcagtagttgatgacttttataatcatgttggacatgcaattaaggaaggggtgaaattggcaatgggtaccgatgcaggaacatacttcaatcgcttttctgatacaccaaatgagttggtggaattagttagagcaggagccacaaattatcaagctttaagagcaggcggcttgggtagtgctgaattgcttaaggttgatcaagaatatggttcacttgaagtgggaaaatatgcggatttcttagttttacgagagaatccattagaaaatgttgctgcagttggtcaaaaagataaacaagtttaccaacatggtttacgtaaattctaaatattttttaccacaaataaggcatcctcgtgagatttttcttgcggggatgcttgtttgtgtagttcaaattaaagtaaacattttactaaattctccagtaaaagcgaataaacataacccaaaatgtaaaaatagttcttgatttagtatgaattacgatgtagtatttaaaccatcaaacgtattactgatgatttgaataagtggagattgaaatgtcaagttttcaagaatactactcagaattacaggaactagcagggtatttactacacaatccagaattaggctataaggagtataaaacttctaaggcagtggaagcagaaattgctaagatttctactaatataaaaatcgaacattattgtaaaacaggacttaaggtaatgtttgataatcattgcccaaaaactattgggattattgcagaattggattcactttatcagccaggtcataaggatgctgaccctgaaacaggagcggcgcaagcttgtggtcactatactcaggtgacaacagccttggctttgataaatgaactgatgaaaaatgatcgtctcaacgagtttggcactaatttggcttttatttttactccagccgaagaatttgtagatcttaattggcgcaaaaagcataagttagctggtgattttacttactttggaggtaagcaggaagccatcaaacttggcgtatttgacgatattgattattgtgtatcagttcatgctataggtgaagattttgagcgtaggactattgaaattaattgtgatttagctggatttaattttcaatactttgacttctttggtaaggcgagtcatgcagcatttgctcctgaagagggggtaaatgcacagagtatagccaccctatttaccactgctttggccttcaaacgtcaacaattaaaaaatccaaatcaaattaggtttaatccagtgatgataggtgataatacagaatcgattaatgtaattcccgatcatgttagcatggggacagatatacgatactttgatgtcgaatatgcacagcaactaatgaagcaattcaatcaagcagcagaaggatgctccctagctttaggcggtaattttaagtcagaaacacaggttggctatttgcctttaaggtcgaatagagacatgaatgctttagtaaaaaatgtatttttaaggaatgacaagatttcagaattgattgaaaaccgaggctataccatggcagctggtgatattggtgatgtaagttatctaatgccaactattcagattggatatggtggttggaatggaaccattcatggctctgattttaaattagttgatccagtttttgtactggacatattcccggaatttatctttaacagtgttttagaaatatcaaataatcttaataaaatcaggacttatcgtagaacaaatcaggaatatcttgaacaattaaataaaatgggagcagaaaaatgaaatctttaaaaaattatggtccattaattattttagtgctattgattgacactattgcggaatttatagggatgcaggttttcaaaattggtaaaattgaagtttcaattctaccattagtattcgcagttattttagcgattattatttatttacttccattaaagccgattaagcaactctacaatgataaaagagtaaagtttgctggaaaatatatgattttaataatgttgccactaatggcacgttatggagcaaatgttgcacctaagattaatgaaattttatcagtaggttgggtatttctcattcatgagttaggtaatttaggtacaattttatttggactaccagtagctttattactaggattaagacaagaggccattggctcaacattgggattaggcagagaaggagaactagcctatattagtgaaaaatatacacttgattcaccggaaggtcgaggagtcctaggtatttacttaattggaacaatttttggttcgattgtcttctcaattttagcaccagttcttttggggatgggctttagttatcaagctgttgcgatgagttctggagtaggatcaagttctatgatgactgcagcttcttcagctttagcagctctggttcctaaacatagtgagacgattctatcatttgcggcagcaagtcagttgttaactagttttattggaacttatattatgtatttcctcgcagttcctttgcaaagattcatgtatgttcacttgactagtttgcttgataaaaagaaagaagtatacccagaacatgattagagaaaataatttttataaattaggtagagatgcattaattttattgcttagtgttagtttagttttatttgttcagtggattaagttagtaaaaaatcctaagagcaccccaattacacctgatacttttgccggcctaggtctattatggctgttttctctgattggcattattatcagtatgttaatgaaacgagttccgtggaagattgttagaggatttcccattctaggctgggtgtctatcgtttcattagttttctgtttgcttagtccatattgtgttcgtgtaattaatgcagtagattttttatcattaactacatcggtattagcctttgccggaatttcagtaactcatagattgaaggatttatcaaagatttcatggaagatcttaattgtggcattatttgtctttttcggtatgtatttcatggatactttgatttctcaaatagctcttaatttgagtggaaaatagaaaaaatacgcgtggtgctagttaaatcgttctagacaataagccaaattataagctaaaattgcaatttccaaccggctttgaaagcctatcagactacgtgctcgattgttctcggcattgtaataggtcagaagcgaaaagtcgctttcaattgttctgcgaatagccatcaattgatgatcattgtgctttttagctcctgtcatatttttacgatatggtgtccaaagttcgtaacccatttgttttagctgttgatgcagttctttgcctaaatagccttcgtcgccaagaagatagtaattagatggatgggtattttctatcagttcaactgtctccctggcatcatgaactgatgcctttgttacgacataatcaagaatgtaaccgtcatcgctaacaatggcatgaactttgaaaccatagaagtaaattttcttggtggccttataaccaatgttggcataaccgcgaaaaattttagcacgatagtttcgaattggttggcaaacaggtaccggaaagctgtcaatgatcaagaactgtccattcaggtcaacctttttattcatttcttgccgtatctgataaatcaattgcaatagctgacgtgaacgccgattaaaacgtgagtgtgataaacaattgaaacattcacagaatcttctttgtgattcaattcctgtcttagcttgccagataagtaaagccaaaatcagactgtccgtagttttaatttgatcaatatttcgccgatgagtaaactcagccggtgcatacaaacgataccagtgccgacaaattatcactaaatctttaaaactaacttgtaaatggtggctaaaacgcttaagcttaaggcagttcaatcagatcagactcttttctattattactatttacaagtcgagtctaacaagattggacttttttattaactaaaacgatttaactagcaccacgcgtaaaaaatatataaagccacgctcaacagcgtggctttttgaagtgtgtcgggcatgacattcatctagtccaatgaaagcttggcgtaccgcaaggtggaccgctctcgccaatcctatccaatatctatttagataaaatggacaaggaattggaacaaagaggcttgcgctttgttcgctatgtcgatgactgcaatatcttcgtcaagagtggtaagtcggctaagcgcgtgatgaagtcaattacatcatggctagaaagaaaactgttcttaaaagttaacactactaaaactaaagtagttagaccaacgaagagcaatttcctaggctttaccttctggaaaacgggcgaaaactggcaagcaaggccgggagacgaccgtaaagccaagctttatgacaagattagagaattgttgagtcgccataaagcagttgctcaacctctatcattagtctttactaagataaatcaagtggtcaaaggctggggtgcaggcgtttttggctttaacgcaaaagaagtcgcaaaaatgtggcaggaggcctttgatactccgacaagcatctccactgtgatttacgctgttattcctggcagaaagaataaagacgtggtagctgattttaaggatatttttgcttaaatagaaattttctctcaaataacaatccaaacaaaaaagacgagccaatgcccgtctttttattttcttgaaataaatttttagttaaaagttagcttttttaacgtaagtgttcttagaaatacgatagaaagtcttgccgtgtaatttaattgcgcgaccataagtgttaacgcggtgacctttcttcaaaactttcttattagcacgcttgccgttcttcttgtagacataagcattgtgcttcagagtccgcttaacggccttagctttcttggcagctgtctttttagcagcagcggcatcagtttgagtcttgtcagatgtagtattggcatctttattagcagtgtcttcagcgaccttacctaaagtaatatcagccttttcgttcatggtcttgcccataacgttaagaccgaattctaagctgccagcgccttctttataagcatctgctgagaaaacatagtcaagggatgagccgtctttagcaacattttcttgcttgccggctacaccattcaatgttaggctagcaaccatcttagacatgtcttgacctttggtcattggtgctttagagccatcaacgtgaataattacttcggtaactttaccgtctttaacattaacttgagcagagttgcccaagaacatagcagcttctgatggggtagtgctgccagttttggtaatagtcatagtgatagtttgcaagtcgctgttttgactagtagcagtagttgcagcaacattagtagcaggctgatcagctgcagacactacagctgatggtgccaaaacactagcgcttgcgagtaaagcaagtgatgttaaaatgattttagtattttttttcataaaagtttcctcccacgaattttaggtatcgcttacattataatcaaataaatgttataaatcaatatatttttttgttattttattttttatgagcataataaactgaataaaatatcaccttgaaaccgattgcatagttattttaagaactttataatagaaaagactaatagtaaaaagaaggatattagaatgaataaaaagttacttaagttaatcgcaagtagttcggtcgcaatgactttaatggcacctggagtggcatttatgcaaactaatccggttgtaatggccgctgaacaaagtcaaaagacagtgggaatgacggtttacaaatacagtaaaaatcaccgcagccatgctaagtcaatggctcaaggttttgtgggagataaggtgcaattaacagttagtcaaaagcatgtgactaagatgacaatccatgtcgatggtaaaaatagtccaatgggcaaggggcaaaacgtaaataagattgtaaaatccctcaagattaatggcgttagcggtaaaaaggaaaatgtttccgccgacaaatctagttttgactttgtttttgcaggaaaagctttcaaaaataatggttgggtcaagatgcaagtcactattgactttggtggtaagatgaccgaacaagcttgggtgaagtatgacaaggttagcggtttaactactagcaagaaaaagaccgacaagaagcaaaagaaggctagtaaaaagagcgtcaaaaaagttagtaagaaaagtacacacggtcagcgcggataaaaaggttcaaaatatcaattatgcggtctataaggcggatcgcagtggcgtttctgcagcaaataatttttacactcatcatgccaggattgaaaaagtaaagcaggactatgttatgaccttaaaagttgaggtaaagcatgggatggtgaccaaatttcagccggtttcactgggaattggttcaatttcaaacctgcgttttaccaaacaagctggcaaggatatctggacttatcaggtacacttcaagtcgctaaatcagttgaagaagcaggctcaggggagtctgcgcttgagcgtaccaattgccaatattcatgatcgtttgtttaaggtctggtttgcttttggtgtaaaaaatgtggcgcacagttcgactgtaagcaaggcattaaccgaagcaaatagtagcactgattcaagtagtactagtgatgctattactgcagctaatgacgacagtagtaaagatgcaaaaaatgctacaagtagcgctcaaccgcagtcaaagccagttaaaaagcagcaggcttcttcaaactctagcgtaaagccttcggcaaagacaacccccaagaagaaaaagatggcaacgattgcagcggtggaatatccatttttgcctgtgatcgcaggctttttagcatttgatgctgcaattattggtttggccttttacttaagaaataaaattttgaagagaaagaaataatgaaaaatatagctaaaattatctcttttcctttcttgttgctaacttgtttgtttatttttggtgtgactgttagtgcacaaagcgtgagttatcgcacttacaagtatggcacgcatcagacctcgatggctgatggctactatgcgcgtcctgctcaggttgtggtagacgacaatcagtacctggtaacgatgacgattcgcactaagaaagatctaagtccctatccggttcaggtgttaacgattgatggacaagcaccgctaaacgtagtaaaaacgcggcatggcagtgactatgattatcgctatagttttcgcactaataatttaaaacgtgatatttctagtcaaattaaaatagatgtgccacatgtttaccaagcaacacacaatattacttttgcttttgacactacacagttgcctaagttaacaaataaaaaagagcgagcaagtcatgcagaaagtgcgataaaacgcagcgcgccacaggtgaaaaacaagagtgttaagcctaaggagcaattggcacaaaagaagcaagcggcaatagctaacaggcaaatagcgcagaatgcacgcaatcaacgtgctaatcaacaaaggcagcgaaatttttattatgttattttggctggagtgcttagttcgttaattttaattggcgttgctgttttgattgtcgtaaatgccaaggaaagaaaaagtaaatgaaaaaacgtaaaggattaattattggtttaattatatttttagtagcaatcgtcggagtggcaattggtgctaaacgattgattgatcaaaaagttgccaataatgaaaagattgttgccacaagtgcagcgattactgaaatttttgataaattgaacgttaatttagcaggggttccaaagacgcaggctaagttaccagcacgctatcaaaaggtgcccaagattgggagtccaatgaagccaagtgttgaaaagattgcttctttgaatcccactcgtgtctatgcagtctcaactttaaaagatcagtatgatcaatcatttaaagaacaaggcgttaaagttacatatttgaagctggattcagtagctgaccttgaagctacactgagttcattaggcaaacagtattaccggcagagacaggctgattatcagattggcttaatcaaaaaagccgttaaaaaggctaaagcacgtgttcacggtcgtaagcctagagtattgatcttgatgggcttgcctggcgctaattacatgattctaactaatcgatcatatttaggtgatttggtcagaatagctggtggggaaaatatctatcactctgatagtcagatttatttgtcaccaagtaatgactcgctagctactaaaaatccagatgtcattttgcgattagaacatgctttaccaaatgtaactttgccacaatttaagcaagagtttaagaaaaattctgtttggaagacgatgaaagccgtaaagacaggcagagtttatgacctacagcaaccagactttaatgcttcagctaacatgaatgtttctcaagcattgaataaattaagcaactggttgtaccctggaaagtgatcaaaatgaagaaaaaggtaatttggataaacttgattttagcagttttgttaatcagtacgattttctttgcattaactcacggagcaagcaatttttcaatgcaaaagatgactaacagccaattgaatattttgtttaatatccgtgtcccgcggattatttcggcactagtagcaggagctagcctctctgttagtggtgccttttttcaggcaactttgcgcaatccgattgcagaacctggaattatggggatctctagtgcagccagtttatgtcaattgctagcggttattattttgccagaaattttctttggtaaaattattttcgcgattattggcggactgctagcgtttgggcttcttttattattccaaaaaaagatgacgccttatcagttaattatcatcggagtggcattgaatgcagtgttcacggggatgcaggaagttttcactaatagtcaaaatagtggcagcagcctggccacaagtagttggggatcgacgatgtatttattgattattggcgtagtagggctgattttcgcgatttgttttatgaattgggctaattacttgaaggtcaatgatgaagagctgacgtctttaggtgtttctgctaaaaccctgcgtttagtcttgatgctaattgcagtggttttggccgcaacaacaacggcttgcattggtgttttagcttttatcggaattattgtgccacaggttgctcgtttgcttttgggatatgattatcaaaaaatcattccattttcgatttttgctggagcttggtttttattgttcgttgacaccatcggccgggtgattacagcaccgaatgagattgcggctaatattattttggctattgttggtggtccagttatgattttaattttatggaagaggcagaaaaatgcttaaagcgtcgcagattgatttttcatatgggtcaaaacaattatttaatcaattctctctgagcctgcaggagcaccagattacgactttaattggtcctaatggatctggcaagtcaaccttgtttcgcttgcttacacgggcaataaggccgtctgcggggacaattacgctagatgggcaagatatctggcagctagctgcgaaggattttgccaaaaaggtagcaattgtccaccagcagaatcaattgtatgatcagataactgtcaaggaactggttaaaatggggcgtctgccgtatcattccttgatgggggatgaagaaaatggatctgctcgccttcaacagattatgcaggagctagagattgctgatttggcagataagtttatagcgcaattatctggcggtcagcagcagcgtgtgtggcttgctacagcactggcgcaagagccggaatatctttttctagatgaaccaacaacatacttggatttgcattttcagtatcgctttttggatttagtgaaaaaattgaatcgaaagcagaatttgacgatttgcatgattttgcacgatttgaatcaggctttgcaatatagtaatcaggtaattttgctcaaccaaggcaggattcaaaagcagggcaggccagaagaggtaattacggcgcagacgattaggcaaaactttggcatagattgcgagatgatcgaaactgagcagggaaaagtcttgttaatggcaggttctgaggcaaaataaaagaccacgagaaaactcgcggtcttttttgtaatataaattattacttgttaacttcatccttgaagctcttacctggcttgaatgctggaacgtttgatgcagcaatttcaatttccttaccagtttgtgggttacgacccttacgagcagcacggtgacgaagttcgaaggcaccgaagccaactaattgtaccttgttgccttcagcaacattgctcttaacaacgtcgatgtaagcgtccaaaatagtgttaatgtctgtcttagtagcatcagtctttgcagcgatttgatctactaattgtttcttagaaatagtttccatgaaaaatacctcttttaatataaactacgattacttattttaacagtaatccgcgtatttacaaggggaaacagcctctttaaagaatttttttaaaaaggaaagaaattctatgtatttgaagcgaaaaatattgtattcgctatcaaaaatgtagttcatgtaatgattcttttgttttgatttgaaaaattaacttttttcaaaaaatttagacattttttgcgtaataaatgatgggagacaagcctaaattttgaattccaaattttgtacagtgatggaatatataagagaggtgaataatctttaattacacaaaccacatcctcgaaatatgcttaaacaatatcaattaagaacgttgaagaatggattaagaatggcaggtataagactatgagcctactaacttataaaggttaccaaggtacttatcgaagttgaaaatgatactttatttggcgaagtcttaggtctagaaaatacttttatttcttatgaaggaaattctctggcagagttgaagaaagatttcaaagcgggtattgatgattatcttgagaattgtcaattgaatcatgagcaaccagaacaggctaaccaagatgcagctaagttacagttgcaaaaattattattaacatcattagcgtgattggaacaaaataaagctcgaaacttctacaaattgtagtaacttcgagctctgcattaatctgtttttgttcaatacaacgcatgctattacatattggcaaatcgatctagttcatcatgtgttcctaatgcaaccaaaactaggattagttcatgtgtttctttatcaatccggtagtacaatagccaatcgtcattatattgacgattaacgtgcattttgcgattttttcctacagggtgatctttatgtttggctagaaattctttgtcattggttaatattgcttcaacacaatcatcaacataatccattggataatgttttctttcatatctcttgtaagcgcggtagtagcgcttggtaggattaacttgcatgattatttccgcatggcctttttgtattcttcaaaagagctataacttccatgataaatgtgattatcagcttcatagttcgcttcatctagttctgtcatgggtcttagttctaaaggaatgccattacttctaacaatagctttgaaatacattctaattcctgttgatatgtcaaccccatatgaagcaagaatatcttgagcttctttttttaatttatcatcgatttttacactaatttgagccatagtacaacctctattcacaaaacgtattactttatctatatagtactatatactataaatacgcgtggtgctagttaaatcgttttagttaataaaaaagtccaatcttgttagactcgacttgtaaatagtaataatagaaaagagtctgatctgattgaactgccttaagcttaagcgttttagccaccatttacaagttagttttaaagatttagtgataatttgtcggcactggtatcgtttgtatgcaccggctgagtttactcatcggcgaaatattgatcaaattaaaactacggacagtctgattttggctttacttatctggcaagctaagacaggaattgaatcacaaagaagattctgtgaatgtttcaattgtttatcacactcacgttttaatcggcgttcacgtcagctattgcaattgatttatcagatacggcaagaaatgaataaaaaggttgacctgaatggacagttcttgatcattgacagctttccggtacctgtttgccaaccaattcgaaactatcgtgctaaaatttttcgcggttatgccaacattggttataaggccaccaagaaaatttacttctatggtttcaaagttcatgccattgttagcgatgacggttacattcttgattatgtcgtaacaaaggcatcagttcatgatgccagggagacagttgaactgatagaaaatacccatccatctaattactatcttcttggcgacgaaggctatttaggcaaagaactgcatcaacagctaaaacaaatgggttacgaactttggacaccatatcgtaaaaatatgacaggagctaaaaagcacaatgatcatcaattgatggctattcgcagaacaattgaaagcgacttttcgcttctgacctattacaatgccgagaacaatcgagcacgtagtctgataggctttcaaagccggttggaaattgcaattttagcttataatttggcttattgtctagaacgatttaactagcaccacgcgtactataaatacaaaatatcaatttttagcgtttgcttttaaaagaattttaaaagattataggtagtcttattatgaatactaggggaaaaaactaaaagtgacatttatatctttaatcgtaatacaccagcagaaatttaaacataaacaaagctcgaagcttctacaaattgtagtaacttcgagctttttgtaactattcagaaaagataatttagcggtcttcgtggttagtgaagtaacggtagtccttactcttgtcgaacaatacggcacgagcgttttcaccgttggagattgagaagatagcgtcagggtacttgttcttaacttcatcttctaccaatcctctaagcatttcgttgttagctaaaactgaaccggttaaagcaatcttcattggcttaggatcttcgtaacggtcaagaccgatgatgatgtcacgggctaacagatgagcttgtttcttaataactttgattgcatcatcgctgccttcatcagcaagttgtgcaacgtgaacagccattcctgcaacttctgggttagacatcttgtagaatttagcgttacattcatccatgtgttcaacgccaaataatttagtaaacatttgaatcaaagcgttgtcttcacgcttgtcccagctaagaagagcagattgcattgctgaacgagcaattgcgtaacctgagccttcatcacctaagatgttgccgtagccaccaactgcgattaagtggccgttttgtaaaccgttgtaaactgagccagtaccggcaattactaaggcaccgtcatcaccttcaagaccagcgtaaagtgctaaaagtgaatcagtaatagcacgagtaggtaagttgttaattcttgatgaaatagttgcggcaacttctggagcattaccgacaactgaaagaccggcaataccaacaagaacgcgcatgcagtcaccatcaaccttgtcgatcaattcgttgatagtgtcagagatattcttaattccgccttcgtagtcagcgttaatttggcctgggccgccttctgcacgaccgatttccttgccagtttcgtcatatgcgattgcagttgagtgggtaccacctgcatcaacaccaatttggtatttaagagccatgttgtaaatcttctttctatattaatttatccgaatgataacgtatacattgtattatatttttatacagtaggtctagtaaaagttttgctgttagcgctaacagtggcttttttcttgcaaattaataaaattgttaaactaattaagctaaccaacatccccagtagaagaacccatggtacataaattaatgtaatttgatgttttcctggattcaacttgaagtttaaaaaagcattcatgaacaaggttttattcttgttaattattttgccattatctaaaactaaccagttaatgttattaggaatagttgacgccaatgtcatcatcttcttcgttgtgaaatgattagatttgatgatcaaagcagatgtttgtttaaagtttggttgtttttgcttaaaacgatgtataatctgctcgagcttttgtgtgtttaagcgccagaagtgaatgccactaaggtctagtttatctttttttagttcaaaagtaacttgcaaccgttgaccacgctggtggctacctagattaatgagacgggcattttgatcacgtactgccagattaatattagcaccattaactgtcattgaaatggcattatcatcgatctcaccgggcatttcaatgtagtaagaatcatcagtctgtggtttgaaattgaaaatgatgcgtgcgatttgcttattgtttttacgattatattgtagttgatcgtttttcatactagttacattaattaattttgctttaggccaattgatctgcttaaacagctgcacttttgcccctgtaactgcttgaaagaatttggtttgattactagtaatatctagagagttaaaattgattttttgcgttttttgtgatgttaaaaagagtaggggcaaagcggcattatttttcactagatatagttgggaaaagcgtttttgcaaatgataatcgctggcatcaacgcggtggttggaattgtcatacttcatttgcttaccagacttgatcgttgtgatttcatcattgggcaaaagataatatttgattccaagtaaatcatctgtcaaagtagttccgccaaaattagtgtaggaattactattgtttagaaatccaagattgttgatcaggttgagtactttttgatcagaaatcgaattaaaattacttaaaccgtaataaccagcgctaaaaggatcatcatcagaacgatagaaagtcttttcagttcggtaaaatccagaatcatgttgatttgcgtattgtactgcttggctgacattagtggtaaagttctgataatcgctatttttttgataagctaaattgcctagagatagtactaggttgacgattaactcaagctcgataactaaataaaaaaatggcgcggcaaaactgtgttgatgataaataaagccaataaacaagattccgagggctagaaaagctcccgtggcaatctgcgcatcttcagttagaaagtcaaaatgtgaggcattaaatactatataaacaattaaacctaaagaaaatagagtcagaagtccggtctgccaataagctatacgttctttttgttctaatgcaataacgcctagatttagcgcaaaaaagatcaacacaaagctgaaacgaccaggataccagacagggaattggcctaaatgccagagtaaaaccagtggtgtccaaaaaagagaagcaattaagaaaatgagtaaaattccgtttgctaatttacgctgccagttaatctttttgcttaaaaaatataaaattgtcagcaacaagaaaggcattgtcagataaatgttgggcatcccttcctgcatttcatgaaagttataggccccttcggctaacttagtcagctgttcaactggagaaaactgccagcccaaattccatgaggcagtagaactagccttgccttgcaacatttcaatcagaacggggaagagcataaaggcatctaaaaatgaaccagcgatactttttcttaaataaatccagttaaggcgtaggcgctcctgcttattgatgaagaaaattttgcttaacagataaagcaaaccaaaggctaatgccataaatccggtataaaaattagtgaaccaaagcaaaaaggtaattaaaattaacttattttttcgttgggccagcaagcggtcgatggcattaatcaataaaggaagcaaaatcacagaatcaagccacatcagattatagtgattgccaataacgtagcctgaaagggcataagccgaactagccgctaaagcgtaaaagtgattagtgattttttgcttccaatagtagtaggaagatagtcccgccgctccaatttttaatgcgataataattaaaattgcttgtggcaaaaaatgttgcggaaataaaaataagagtagattgaaaggactgcagagataataggcatcagttgctagcattgaaccgcctaaaccattagaaaaggaatagattaagcgcaagggatgggagaacaaatttcgcctgaagaaggcaagaaaatcaacatattgttgacctaagtcgacagtgagcactccatttttgctgtagaaaaagtaactcaagaaaatcaaagccggtagcaaaaaactaagccagaaaaaaatatttttacgattaattgcaatgtgtcgtgagttaagaaatttaagcatcattaaaaattatataagctcccttatgaattgtagaattgatgtttactttttgttaaaatacatctagttttaataaaggtgatttacgtgaattattttagaaaaaatagtgggactggctcaaacaagcattcctcaactccaattagaatgcgaatcattctaggggtaattttagtcctctttgccatgttaattgggcaattggcttatttgcaactagtttatggttcacgtttcaaggcagaagtgcaaaaaactgattcaactgttgtttcgcatcaagtgccacgtggtgtcatgtatgacgctaagggacgcgttttagtaggtaataaagcaaccaatgctattacttatactaagagtgcctcgactacaacagcagatatttacaagatatctaatgccttgagtaattatatcaagattagcgatgaaaagccgacaaagcaaatggcagcagattattatttagctaatgaagataataatactaagatatctaatgctttgccgaagtcagccaagattgatgctgatggcaataagaagacttcagctgaaatctatcaagcggaattggcttatgttgaaaaaatgaatcctcaactaaccactcggcaaaaaacagcggctttaatctttaataagatttcaggggcttatactttatccacgatttatatcaagaataaaggcttaaccgatcgtgaaattgcccaagtaggtgagcacttatcagagcttcctggtgtgggtatcggaactgactggcaaagatcttatccaaatggttcatctattcaaagtatcattggttcggtttcaactgaaaaatctggtttaccaagtgatagcttgcagtactacttaagaaatggttactcacgtaacgaccgggtaggtacttcctatcttgaaaaagaatatgagccacttttgaagggaactaagtcgactaaccaggttattactaaatcgaatggtaatatccagcagactaagactgtttataatggtcaagccggtgccagcttaatgttaacgattgacgctaagtatcaaaagcaagtacaggctactttgaaacgggtttacagtacagctgttggtaacggtgcagcaagatactctaatggtgcctatgccgtggcgatgaatcctcagactggtgctttgctagctgtagccgggattaatcgaaacacgaacactggtaaaacgactgataatgctttaggtgtaattaaccaatcctttgttatgggatcagttgttaagggggctactgttggtggtggattaattaataaggttattactcccgaaaacaatactttgcctgatacggcaatttatttgccaggttcaccagttaaaaagtcagtttatccagttggtactttcagttcattggatgctgaaacagcgttggaagtctccagtaatatttacatgatgcacttagcaatgaaatgggttaaggctagttatgtaccgaagagctacattcatatgccaaacgatgcctttgacattttacggcgtaattttgctatgtttggcttaggtcaaaagacaggcgttgacctacctggtgaagtgtcaggaattgaaggtaagtcatttaatgacaagggtaatattctttccggttctgtacttgacctagcttatggtaactatgatgcttatacaccaattcaattagcccaatatgtgtcaactattgctaatggtggtaagagattgcaaccttatattgtgcaatcagttggtaaaactagcaaagatggtaagaagatttacattagctacaataagaagccaaatgtccaacaagtaattccttggacgcttgcggaacttaatgtggttcaaacagggttctatcgtgttgttcacggtacgaatggttggggaactgctcacccattgaagaatgttaagccatcaatttttggtaagaccggtactgcacaaactttctactatgatgctgaacaccctaatagaaagcacaatatcgaattgattaacacaacctttattggctatgctccatcgaaaaatccaaaattagcagtggcggttgttttcccaggattagaccctgatggtgaaggaacatacacattgcaagttgccaaagcaatggtacaagattatttcaaacttcattcaacaaaataaagaataatactggtcaaacagcttgaaaaatgctattctagtacagtcagaataaaagtgtaggtggtgaaaaaaatggcagataacatcattttagaatgcaccgaatgtggcgatagaagttacttatctaagaaaaacaagcgtaagcatccggaacgtttatctttaaagaagtattgcccagttgaaagacgcgcaacacttcaccgtgaaactaagtaataaaccaagatagcaggctacgtgcctgctattttttgttttttggacaaaaagatgaaaaaatcagaattaagaaaagaacaaatcagtaaattaaaagaatttgccaatactaaagaaaaaagagcagaagatgcgattttattagagaaattaatgtcgacagatctaattagaagaagtcagacgattggggtaactgcttctttaccactagaagtagatacttctgaattaattgctcgtttgtgggataaaggaaaagaagtttatctggcaaaggcacgaagcgatcaaaatcatactttagactttttacgctatacgtatatgagcaaattggtaaaatctaaattcggtgtggaagaagtcgccgatgaagatgcgaaaatcaataatgatttggatttagtcattgtgccaggtttagcctttgccttagattcgcatattcgacttggctttggtggaggttattatgatcgctttttggctaagcatgatcctaaaactgttgctttagccaatagcaagatgacgttcgatactagcatttggcctatcgaaaaaaccgatattccggttcaaacaattgttactcctgataaaatttattaaaatagtcacaatgacgaagataaggggggattaaatgaatactaaacgaaaaattaacctctcacaatcatttgtgactttaggaattttagtagttttattaatagtctttttagttgaagtgtttttaggtggctcagagaataccaatgtcttgatgaaaatgggagccatgaataattttgcggtggtggctggacaccaatggtggcgcctatttatggcccagtttttgcatattggcatcatgcatttggtttctaatgccattattatttactacatggggcagtatatggagccattaatgggacatgtgcgctttttagtgacttatcttttagctggggtcggcggcaatctaatgagcttggctttcagtgctgatcgcggcttaagtgctggtgcctcaacagctttatttggtttgtttggggcaatgactgccattggcttgcgcaatttgcataatccaatgattgcttttttaggtcgacaagcctttgtcttagctttgattaacttagcgcttgatatttttgtgcctggaattgatatctggggtcatattggtggcttaattgctggcttcttattagcgattatcttgggcgatcgtgtaatgaagacctacaatcctaagtggcgcgtattggctgctgcagtgttagtcgtatatgttgtttggacggttagaacaggaatgataattaatttctaatgaaaactctctacgatgtacaacaattattagaaaaatacggaattttggttcatgttggcaaaagaatttgggatattgaattaatggctttagagctcgacaatatcaatcgtgccggtctgattgaccaacatgattatttgattgccaagatgattttgagtcgagaacatcgaattgaagtcaaaaatgaacaaaaaaaggcgcttaaagatccgaaaaatgatagccagtaaattagtttagcggtatcataatagatgtaagtttttatgaaagggcagatttagtttatgtcgagttttttaattgtcttagatttagttttattagtcattattttagtcatggttggtatctgggcttggaataaaattcaagctaaatcaattggtggcgaattgactaatgaagaatttaaagaaggcatgcgtaaggcacaaattattgatctgcgtgaaaaagaaccgtttaaacgcaagcatattgatggcgctcgcaacttgccatataccatgcttaagtatcaatatactgagcttagaagcgacttgccagtttatctttactcagattcaaagaccattactttgagagctgcccgttttttaaagaaaaagggttttgtttctatccattggcttaaagatggctttgaagcttgggatggtcgaactaagaagtcaaaatattaaatgaaaagaagacgcatttggagggggtaactctaatgcgctctttttttgtatcaaaattaagaaaggtgatggggatgaaaaaggtactagcgattgtaggaccaacagctattggtaagacagacttggcgattgatttagctaaaaggttgaacggtgagattatttctggcgattccatgcaggtttaccaagaagtggcagtgggaactgcaaaggcaactgcagaagaacaagcgcaagtgaaacactacttagttgatacgcaatccgtttttgacgagtattcagttaaagattttgtggatcaagcaacaaaagcgattgaagagattagccaaaaaggtaagttaccaattattgcaggcgggacaggtttttatgttaatgctttattgaataagatgcagctaggcgagaaaactccagaagagcgtagcgtttcgcaaaagtgggaaaactacctcaaggaaaaaggcgcagaaaaattgtggcaggtcttgaatgagcaagatcctaaggcggcagaaaaaataccagtagccaatagtcgcagaactatgcgagcattgactgtgattgagcgtacaggcaaaaagttttcagagcaacaaaagcagatcgagccccgttatgattacttgattattggcttgaattctgaccgtcaagagatatatcgcaggattaatttgcgtgttgataagatgatggagcaagggatgctcgatgaagcaaaatttatttatcaaaatcgagcacgagagtatcaggtcttgcaagcaattgcgtataaggaatttttcccttattttgaagggcaagagacgctagagcattgcattgaagatttaaagacagcttcgcgccgctatgctaaacgtcaattgacttattttagaaataaattaccagtagtttggtttgatccgttagatgatccgggttgcgaacaaaagatattgaagaaagtcaaggaagggaaaaatgaataatttgccagaaaaattacaaaaaattgttaaagaagttgatcaacagatcgcacctaaactggctgagattgaagatcaaattgtttataatacggctaaagttttggcggcttaccaagctaatgatgtcgctgaagctgacttgaatggggctaatggctatggcgacgatgatatgggaagagataagctagataagatctatgctcaagtttttcaaactgaagatgcggtagttcggcctcaatttgtttcaggtacgcacaccttgtttgtagctctagcaggcaatttgaaatacggcgatacgctaacttatttaactggacagccttacgatactttgcaaaaagtgattggcttgactgatgataagcgtggtactttagtcgagcgcggcgtgcatttttcatatgtgccgttaaccgatgatgggttagttgattatgacgcagctgaaaaggttcttaaacgtgatcaacctaagatcgttgccattcaacgctcacgtggctactctactagaaaaacttttactgtcgatcagataaaggatatgatttcctttatcaagcgagttagtccgaagagtatcgtctttatcgataattgctatggtgaattttcagaaaaacatgagccaactgagtatggtgctgacttaatggcaggatcgctgattaagaatgctggtggtggtctagctaagaccggtggttatattgttggtaaaaaagacctggttgaaaatgcaaaacttgcattgactgctccaggctgcaccgatgagggcgccactattggcaatttgcatgacttttatgaaggctttttcttggctcctaatgttaccggtatggctgaaaagggaatgatttttgcggctgctttgtttgccaaaatgggcttgaatgttaccccagcttgggatgagaagcgaagcgatattattgagacaattatttttggtgatcctgataagatggttaaatttgtgcaagaagtacagaaaaactcaccgattgattcctttgtaacgcctgaagctgtgcatatggagggctacgaagataagattattatggctgctggtaattttgtttcgggttcaactattgaattttcagcggatggtccaattagaccaccttatgcggtttatatgcagggtggcttgacttatgcgcatgacaaagtagctattattaacgcggttcgtgatacattttttaacaaaaaataaaatttaaaaataatcactagaccaatttgacttttttaaattggtctgctattgtattaaacagttctaggagataagaataaatcataggaccataccaatttaatattttttgtttttataggtgaattaactatgagtaaacaatatactgcagaagaaattaagcaagaagttgaagacaaggacgttagatttttacgcttggccttcactgatattaacggtactgaaaaggccgttgaagtacctaagagtcaattagataaagttttgactaatgacattcgctttgatggttcttcaattgatggctttgttcgtcttgaagaaagtgacatggttttatatccagacttctcaacttggacagtattgccatggggtgacgaacacggtggtaagattggtcgtttgatttgttcagttcacaccactgatggcaagccatttgctggtgatccaagaaataacttgaagcgtgttcttggtgaaatgaatgaagctggattcgacacttttgatattggttttgaaatggaattccatcttttcaagttagacgaagatggcaattggactactgaagttccagatcatgcttcatactttgacatgacttcagacgatgaaggtgcaagatgccgtcgtgaaatcgttgaaactcttgagggcatgggctttgaagttgaagcagctcaccacgaagtaggtgatggtcaacaagaaatcgactttagattcgatgatgctttgactactgctgacagatgccaaacctttaagatggtaacgcgtgcaattgctagaaagcacggtttgtttgcaagctttatggctaagcctgttcaaggtcaagctggtaacgggatgcacaacaacatgtcattatttaagaatggcaagaacgtcttttatgacaaggatggcgaattccacctttcaaatactgctctttacttcttgaatggtattttggaacatgctcgtgccattactgcaattggtaacccaaccgttaactcatacaagcgtttaattccaggttttgaagctccagtttacattgcttgggctgctaagaaccgttcaccacttgtacgtattccaagtgctggtgaaatcaatactcgtttggaaatgcgttcagctgatccaactgctaacccatacttgttacttgctgcatgtttaactgctggtttgaatggtattaaagaacaaaagatgccaatgaagccagttgaagaaaacatctttgaaatgactgaagaagaaagagcagaacatggtattaagccattaccaactactcttcacaacgcaattaaggccttcaagaaagatgatttaattaagagctcattaggtgatcacttaatgcacagcttcattgaatcaaaggaattagaatggtctaagtactcacaatcagtttcagattgggaacgtcaacgttacatgaactggtaaaaataaataagtaattggaaaatctcgtggtgattgaggccacgagatttttttgtaaagtatagatttttcaaaagcatatctaatcgtaattagtctaattacgattagataagtgaacttatggataagtttttaaatctagtaggataaacttttaccaaaaatcaaaaaatattctcttcaaagaagagcaaactgctatataattgtaataatgactggactggtatccctaattagtttagggatacttttgtgttaatgagaatgtattggagtcgatggaatgagaaataagacattagtagcattttgtttgatagctgcaatgatcaatttaactgcttgccaatcgcaaaagcagactaataatcgccaaactattgaaaaatctggtgtgactcagaaacagactcccaaaagattaattgttaagagtatgtcagatactgaaaaatctagtgcaatctcaatttatggatcgatgaaatatggggatgcatggaagactgcatatagtgatgccaagaaaaatcgtttgagcattagtgtaaaaaatcgaactggttttaattggataaaaaaaggtagaggctacatttatgaagtaactggcaatggtcaagaaaataatgctttttatacaatgaaaagtgaaaccgtatatttttataatcagaagaaaaatttaggtgtagcaagtttatctgaaatagcttcatatttaaatgaacataatcaagtaaaatctgtagaaaaattagcaactaagactactttggctgctgaagttacatctgacaaatatggggttaagggtgacgatggcctagcattagttccaacgagacttttgggtacttggtacaactataaaggaaagaagttagtaattactgatcatactgttaatggtgaagaaattcatcatatttctaattctggtgtagcagcagaatccttagatcaaacgaaaaagtgggctagagctcggatcgaaaatattaatggattaaattgctatcatgttcaaacattgaatgcccaagattttggcttactttattctgtccaaaaagataatggcaatacggcagtagtaacttatagcgttgatacaggtcattatacggctacttattggaagagcaccaagatagccaaggaacaccgaaatgcagaatttaagactttaaattaatatttgtaaagaagtattaaaataattgcaatgaacaaaaagtataatttttgtaaaataatcgtgtaagaagttggcggatcgtattttttataatactattaagcaaagagatagaattattgaaagaaaaggggattccttttgaaaagtaaattaactgttttggttgcaatttcagctgctttaactttagcaggatgtagccaaagtacacaaggtaatagtaattcacaatcacagtcagaaaaatcaagtcaagtttctaagagtaactcagaaaaaactggcacctcagaatcaagtaacagtcaaaactcagcaaaattatctgctgagaatatggactataagacgcaggctagtgcaatctctgtctatgctgcacaaaagtatggcgacacttgggaaattgcagttgatgctgccaaaaatggtaatttaggtgttgcgttcagaaccaaagccgcaacaggtattacttctgatgactcaggatatgtttatgaagtctccggtaccggtaaaagcagtaatgctcgttacatgttaagcggggatggagcacaaaagaaaattactatttttgttaagcaaagaaaccttggtactgtaactttacaagatgtagttgattacattaataaaaataatgatgttgatctagttcaaagcttggctaaaaatgccaaactagatgttaaacttgaaggcgataatgacaatgcagctggtgctaaggaatctgctagtgccgtaattccatcaagcttgcaaggtacttggtacactgcagatactggcaatggcaatatcgatactttgactgtaactgctaataagatcaatgatgaagctggttttagcatggatgtaaaggctaaaaattcaggttcatcaactagttcaggctatatgaaacaagctactattaatggaattaatttctatagttttactaatatgggtcaagaaccaggtcaaggcagtacatatttggcaccgcatactgaaaatggtcaaagtgtaattgtttcagctaactctaagggaacaactaatgctgtctactggaagagcgaagccttggctaagcaaaactccaacaagcaatttagcgatctacagtattaaaagtgaataaaatatagaattaggcgatatctttgcgatatcgccttttttgttgtgaagacgtttttataaaacttttacttacgaagaaaaaatttttctggtaaagtaatcaacgttgcagaaaaaaggaggaaaaatttaatggataatactcagagtgggggtgaaagctcgcatcatgttcaacggccttggcgtgctattcttccattaatgtttggagcattttggggatgttcagtgaaacttcgttgaatagtgaatggaagtcgttaattacttagtatttggagtggctaatactttttttgatttctgtaaaactaatttattgtcaataaattttataatataatataattttagcaactaaaaatagttgcaagaaaagaatggttaatggtaaatcacaagaagacaatagaaaagatcaaagcagaatcggtaaatataacttatatagaagcggaatctttgcttgaatggttaggctatactaaactaaataaaggcaaaacaagtggctcacgtgttaaattcattaaaggaaataagccaatatatttgcataagccacatcctagaaaaaacttgttaaaatatcaagttaaagatttaaaatctaatttacgaggtgaaatctaatgaaaaaagaattatcatacaaaggctattatggttcagtagaatattcattagaagacgatgttctctatggtaaagttattggcattaaaggactcttatcatatgaaggacaaacattagatgaattaagaaaagactttcaaggtgttatagatgaatatttggaagattgcaaggctcaagggattgtgcctcaaaagtcgtataagggttccttcaatgtaaggattacacctgaattgcatatgaaagcagctgcttatgcagctagccaagccgaatcacttaatagtttggttgaaaaagctatcaaaaaatatgtgaatgcttaagcaatgtagtttttagtggctatggtattctaaggagttgctagaaaatgccaaataaagaaatactatattttaatgatcatattgtcccttggatagaaaaagaagagtgggctaataatgagcatacagaagtcgctttaacttttaagaaaaacaccccagtagatattattaataaatttttgatttgtcgatctgaattagctattaactatactgcagattataaaattgtataggaagactccatgttgtatccatatgcagaatttcctggagaattgtcaattacatattctcaaataatggtagacgataatgtaaagggtggtaaaaagcttttggtccactttgaacaaccgacagattatggatttaaagaagccagatatgagttgcctgattataaagaaatttacaactacgactttacaccttctgaaactagaaataatctagatattcttaagagaaacgaaagtctaatttggaagtgtgccgaagaggaggaaataatgattgactaaaaggtagaatttagcagtaataaatagaaaaagatgcagctaatttgttcagaaagataaaacatagaaacaaattggttgctgctaaaaatttaatattttgttcgcttgtttttgtttcatcctttgctaaacttatgtttgcattggaggtgaaacaaatgattaaaactcaggtagctgagctaaagccaaacaagaccatgcaaagagaacttgaccgtctatgtgattaccgcagatactgctggaatctggctttagccacttggcaagacatgtatgaagcacggactttagacaaggataataatcctagtcctaatgagcgtcgagtgcgggatgaattagtcaataacaaggctgattggcagtttgccttgtctgctcgctgtctgcagttggcagtcaaggatttgtccaacgcttggaaaaatttctttgacaaggcccagcctgattggggcaagccgcatttcaagtcaaagaaagccccacgtcaaggctttaagactgatcgagctaaagttattaatggcaagctcagactggataagcccagaggaattaaatcatggtttgatattccaacatatgaagcattaaagatggaagaggttaaaattgccagcatctttagagaaagaggacattattatgcagcacttttctatgaagaagaggctggactaaaggctaaaactggcaaaaagaccgccatcgatgtcaacgttggacatttcaactacactaaaggcaagattaatgttttaccagccaaactacagaaactgtacaagcgaatcaagcattatcagagaatattggctaaaaagagacgggctaatggcaaattggctggccgaagcaataattacctgcaagtgagaaccaagcttcagcgtgattatcgcaaagtagctgatattcagaatgatcttttgcaaaaatttaccactgaacttgtaaacaattatgaccaaattgttattgagaacttgaatgtcaagcaaatgatgatgacgcatgtggcttccaaaggcatgcaaaggtcactatttggcaagttcaaacaaattttgacttacaaatgtgaatggtatggcaaaaagctgatcttggctgataaaacatatccatcaacgcaaagatgtgccaattgcggctatgtcaaaactggtgcagacaaaatcaccttgcagggcaatagaaaacatggcaccaagcacaatgaatatgtttgttatgagtgtggctatagcaatgatcgtgatgacaatgcagtattgaatttgctagcattaacaaaataaaagacaatggggctggctaagcccttaagctgcaagagttggtcaatgcgattactccctagatggaatatcggaataccaatgatgacggcagtaaataaaattaggaaaggaaaaatatatttctttctggcatgtagaaaatattaaacttctacatgtttctatgttttatatagcagaaaacaagtacctaattattttcggcttaaaaattttactatgactacaattgattttcatgactaataagaagaactcactataagtgggttcttttttaataattacaccactataatatcttaagtaaagctaaaaatgattcagttagaaaagagtaaatatgaaagtcttaaaaaagtgggattagcgttgttgtcagtgatactggcatgtgtaattatcttctgtggctattatatatatttggctctacattattatcgaattcctgataatcaaagattgaaaattaataacaatcagtctcagttattaaaagcggggcgtagctataaggcaacgacttataatgttggctttggtgcttataatcatgatttcgacttctttatggattcgggtcagttgaaggatggcaagaaactgcaggggcatcgagggacagcaatatctaaacaagcagttcttgattccactaatggtgtcattcaaacaatgaaaaagcagaaccctgacttcatgtttttccaaaaaattgatactgattcaactcgtagctttcacgttaatcaggtgaaaaaggttgaagatgattttccaaaaatggattcaacttttgctagtaatttccactctgcttttttagcggttccattgaacaatcctcatggtactgtacgttcagggctgttgagtatgagcaaatataagatggatagtgccataagaagaaaatatcctgtttctagtgggcctattgaaagatttgtcgatttagatcgttgctttgtagttatgcgttttccagtaactaatggaaaagatttggtaatgatcaattcacacatgtctgcctatgataaaggcggtaaaatgcgtaaggcacagatgaaactgatttcttctgtgatggaaaaagaatatcgacgaggtaactatgtcattgtcggcggcgactttaatcatgcgttagggaaagacatgatgactcattttgagcaccaagaagaaattcctagttgggtatccgttcttgatcaaaaaatgctgcctaaagatttcactatgattaaggcgcaaaatcgcgaaaatgttgcgactgttcgtgctacagacatgaaatatgatcctaaagttaattatatgaccatttgtgatggctttattgtgtcgaaaaacgtgcaagcaaaggcgtataacattaatactcattttgagtatgcagaccataatccggttaggttggagtttgaacttaagtagatttggacaaagtgaaaaacactggatcatgaaactgtagatttatgatttagtatttacgaaattaacttatgaggtaaaatctaatgaaaaaagaattatcatataaaggttattatagttcagtggagtattcattagaagatgatactctctacggtaaagttattggtatcaacggtcttttatcatatgaaggtcaatatggggtgaaataagatgagtaagattcaagagttcatcaagaaagatattgagagacatccagagttaaaaaagaatatgaacaagtaaaccttaatttagatgcttcagtattagttaaagatatgcgtgaaggtttgggaatgagtcaataagactaactgaagaatagttagtaaaataatgaaaagcattaaaattatatttgacttttaaaataatttagactattattttaattaacataaatattaattacttagcgatgataaggaaagtaaattgacggtccttctacagagaattatcagttggtgaaagataatgatcgacctacttttgaaaatggcctttgagcttgaagctacgaaatttttagtggcttctgggtccgccctctatagcggtaacgtatcgccagccggccgtacgcaattcaaggtggttttccataaaaataggtggtaccgcgttactgaacgccctattagatcaaaatgatctagtaaggcgtttttctttttaccgtttttagcaaaggagatttttatgagaataaataaaaaagttgtttcattcggattaatagctttaactacggcaaccttagctgcttgtggtaagcaatcagatagtaataccgtttcaaaaaagcaggttttaaattggtcagagatcacacagctttctacgcaggatccttctttggcaactgatactaccagttttcaagctcttcttaataccggggacggactataccgccttgataaaaacaataaaccgcaattatctctagctactaaggctaaaacttctaatggcgggaagacttatgatttttatcttagaaaaaccgcaaaatggtctaacggcgatccattaactgctaaggattttgtatattcttataagcgtaccgttaacccagcgactaagtctcagatggcattctatctttaccagatcaaaaacgcgcaagcaattaataagggccaaaagtctccggataccttgggtgtttctgctccttctaaatatcatttgaggattcaattaactagaccactgccttacttcaagattttattgtcgtggccattatttttcccgcaaaatcaaaaagtggtgcaaaaatatggcaagttatacggcacgcaagctaaatacacagtttcttcaggcccattcacgcttactagatggaatggtaacaacaagacttggactttaattaagaataagaattactgggatgctaaaaatgttaaattaaataaagttaatgaacaggttagcgaatcaactacgactagctataatctttttgaagcaggtaaggcagatgagactggacttactggtgagcaagttgccgcaaataagaataaagcaggctaccatgcacgtttgtcttcagcgattaaaagattggaacttaacgaaaacaaggtttcagctttcaagaatttaaaggtacgccaagcattttctttggcaattaaccgtaaacaattaacaaataatgttttaaaagacggctcaattccggccaaaggctttgttccatcaggcatgggcaataatcctaagacaggaacaccatttgaagatgatgcttacgttaagagtgcagtatcgtataatcttgctaaggctaagcaattacttcgcgaagggtataaagaatctaagactaactcaattaaaattaccttgttagtttctgatgacgatacttcaaagcaaacagctgaatttcttcaaagtaagctagatcaacttccaggtgttcaaatttctgttcaaacaattccatatactcaattgatttcacgtcaaacagctggtaattaccaagctacaattaaaaactggcaggctgtctttggcgacccaatcaacttcttggacgttttccaaaaaggatcaagttatttgaacaatggttggaataacaatcaatttaacaagctgttgaatgaatcagaaaacgtatatggcaatcaaccagtaaaacgctgggcaagattagtagaagccgagaaggtattgatgaaagaccaaggaactattccattagttcaagttgctaagccacaattattaaaaactaccgtaaagggagtttcttttaaccctacaggcgttccatacgattttaagaatgttagaattgggtagataaaaaataaagtcattgatcacttgtgtaaacaagttttcaatggctttttggttttgtctgaaaaaaataatcgattttacttaaaacaaaacctttatttaatggtaaatgtgaggagaagaaaaatgtactcagaggatatgtttacttgtgaaaagagttttaaagaaaagctgaagaacttgactgcacaaaaagatcagtttgctaaagattctgattttatcttcaatcttaaaaagatagtagatacgcgtggtgctagttaaatcgttctagacaataagccaaattataagctaaaattgcaatttccaaccggctttgaaagcctatcagactacgtgctcgattgttctcggcattgtaataggtcagaagcgaaaagtcgctttcaattgttctgcgaatagccatcaattgatgatcattgtgctttttagctcctgtcatatttttacgatatggtgtccaaagttcataacccatttgttttagctgttgatgcagtctttgcctaaatagccttcgtcgccaagaagatagtaattagatggatgggtattttccatcagttcaactgtctccctggcatcatgaactgatgcctttgttacgacataatcaagaatgtaaccgtcatcgctaacaatggcatgaactttgaaactataatagtagatctttttggttgccttatagccaatattcgcagaaccgcgaaaaatccttacgcgataattgcgaaccggctgacaaactggaacgggaaaactgtcaataatcaagaattgtccgcttaaatcaactttttgattcatttttttgcgtatctgataaatcaactggagcagctgtcgagaacggcggttaaaacgcgaatgcgatagacagccgaagcatgcgcagaaccttctttgtgattcgattccagtcttggcctgccagataggcaaagccaaaattaaactgtccgtaacttttacctggttgatgtttcgccgttgactaaaacgcttaagcttaaggcagttcaatcagatcagactcttttctattgaatactacaacttgagtctagtccgattggacttttttattaactaaaacgatttaactagcaccacgcgtagttgctaaataatgtacgaacgaatgataatgcaaggcatagatgtgtacattagtgagatatacataagctaaatattagaaaagggcaaaacatttcaaatagttttgcccttttgatatctattcttttgttaaattttcattttgcgcttaacttcccatttacgaagcaaaggtaaaataaatcctgtaccgaataagaatagtactactacgatattcatccataattgatgaaaccatttcggtgttccaaattgcccattctgcggaagaaatgccattgttgcacaaatgaatgttaataggaaacaccaccagcctacagccagtgcgccttttctgtttttaataaatacaaattcatttttaccaaagtgtttacgattatatcttaaaatcagaaaacatagaaatactacagcagttttgtatggtgaaacgatagtattgatattaagtaaccagttaacaaaatcgttaattttaggtaacgtaccaccaaggacaattagtactaaagtagttccagcggtaaaaatgtaactgttaattggacggccgtttttattctttttgagtagccaactaggcatgtacttaactgcagtatctgatgctaagaaacgactggcggcatcaattaaggcagcaatttgagctaatagactaaccaagcaaactatagagtatgcaagcattaagctattacccataccagcttcgcgccccaataattggaaagcaaaataatcaccattcattttgaagtcattaggaatatgctttgcatcaaataaaacagctaatccgagtgtttctagaatgaccataagggcagtaacaaaaaataggagccacatggtcttaggaaattctttttgtgggtttcgtaatcttgaaatatatggtgctgccagttctgctcctgacattgcgaaaataagcatacttgcactggagaaataatgcaggcttaaatgaggtttgatgttgttccaagttaatttagttgcaatatgtccaccatgagacaacgaccatacaatcataccaaagaatactaacgtcattactaccatggcgataccgctccataatgaagttgcatctagggcatccttaacggtattatcgaagatcaaaaataacaatatgattagaaaggttataaaactaaagaccattggcgacattttttgacttagcgatcgattgccaagaattacccaagatatggatacaactactgaactagcacaatctattaaataaggaattgtttgtgcccagtacatccaaccagtggcatatcctagtaaatcgcttcctgtaccgcgcctaatccaagaagacataccacctgcttcttcaccttcatatgcactacctaattcggtggcaatcaaagtgtagggcagctgatagaaaagaagcatgataatccataatactaagacgaatagtccatattcttgatatgggtagaatggatcttcgaaactgataactgttatgtagacaaacatggatagggttatccaacccatataatgcttttgagtgttttcctctgtcatttttactccctttaaaaactaattttgaggttggttttcaaaattagaagacgggggcttgttttgtctttttaaaaactcgtaaattgcaataataacttgaacacttttgtttaggctgtttgatagatgcgatctaattctctttcaaagatttcatctggtgtatgataagccaagatctttcttggcaatgaattgcaccaagtttcaatgtcaatgatttgttggagagagtagttatgaatatagtcacctttaggaatgaatctgcgaataaggccattatgcctctctacagtgcctttatcacaagaagtatatggatgagcataataaactagtgatttggaaatatcttccagctgagatagatccgcaaattcagaaccattatcagtcgtaatagttttaaagatatcgttccaatgctcgctgtattgcttgcgcagacttttaaaggcattcattacactggcagctgttttatctgggattttaataattaggaactcacggctcatgcgttcagacaaagttagcagcacttcgtcgtccttggtcttatggcctaaaacaagatcacattcccaatgcccaaacacatcacgcttattaacttcctgtggtcgttgttcaatactgcggcctagcttcttcttatttttacgaatgcgatgaattttggtattgcgcttgagtttctctggcaaatcatagttatggatgtttaacaagccttgatcgacataattataaagcgtcctggtgcagacaatatcgttgctggcaaattcacccacagcagtgcagcgattactgcagacatcgagtgaccagccatcttcaaagaagtgccgttgaacgtaatcaataaatttgtgctttttgagaaagtcagattttcgaccacagtgctgacgatggttttgataaacgctttggccttgctgggctttataacgtttgatattgccgtgatacagcttaacggttcctcgcttaatctcatagtgaattgtactaggggaacagccaatttctcgagcgatggaacgcaaagaacaatgatctttcaaacgagtttgaataataacccgctcttcaagcgatagatgtgttccttttttacgcttgtccatgatagaatgtagtgagtccattttgacctccatagatgtttttgtggttattaacattctatcaaacaggtccaaatggactttttattttctatcaagtgttcaatttaattttacaatcggccctttttaaaaactcaaaaaagtactgcatttttgctaaataatttttcctcctaaaggttagtcttattattacgcaaaaattatctataataaaggtatcattaatattttatggagggtaaaatgcattatctaagaatagctgctcgaaaagatttgttgccatatttgccgaaaaattggccaactactgaattaaaagagaatctaaatggtgcatatttagccgcagttgttgtccgaaaaaaggatagccgtggagtgggtatgcaaaaagtatttgctaaacaattaaagttagatttacctttgattatttgggaagataatcaagatatgataaaggaaattgatcaaaaagcgagtcagtatgaaacaaatgtaattcctgaatttcttagagacttaactaagtttgctgatcaggacgatttgattttaagtacaccaggacatcataatggtcatttctatgatcgtcatccagctggagcggtgatgaaagaattctttggtcacaacttgtttaaagcagatgtttctgatagtgtatttgaactgggagatatgatgactcatgagggtggaccattaaaagcagaagaagaagccgcaaaagcgtacaatgctgataaggtttacttttgcactaatgggacaaccagtgcaaatactatctgtgcaactgctgtattgaaaaataatgatctcgttctgtttgatcgtaataatcataaaagcttatacaacagtgcattaattatgacaggtgctaaacctgtttatttacctactgatagaaatgctgatggattaattggaccattgactaaagaaagtttaaacgaaaataaaattagagaagaaattgctaaagttgatcctgatcgagctaaagtcaaacgtccatttagaatggcagtattacagttggaaacatacgatggcgtattttacaatgcaaagtacttaattgaaaaattgggtaggctttgtgattatattctttttgattgtgcttggggaggttatgaacaatttgtagatgttttgcgcgacttgtcaccattacaactgtcttacggtccagatgatccaggtattctagtaacgcaatctattcataaacagcaagctggaattgctcaagcttctcaaattcttaaaaaggatggtcatttgaaagggcagaagcgttatgttgaccataagcacttcaatcatgcatatcttaaatatgtaaccacaagttattcttatccaatttattcttccttagttgtaaatgcgaagatggcaaattcaccagcttgcaaatcttggtgggacgatacagttaaactttcaattaaatttagaaaaagattgctaaaggaaagtaagctttttagaccgttagtgcctttaaaaattaatggtaaaaaatggcaagatatttctacagaagtgttaatgcatgataagcaagcctggaaattaagtccttctgatgattggcatggatttaataaaatcgacgataatgaagtagttttgagcccgttaaaattaacagttcttaatccaggtattgatttaagtggtgaagaatatgctgaagaagggattccaggggttattcttgaaaattatcttcacgaagaacatattattccagaaaaatctgatatatattcaacactttatttaattactcctggagaaagtaatgttgatatggagactttatttgatgcattaatgaggtttgagcatgcttatttggataaacaagcattatctgaagtgatgccacaattagttaagaaatttcctgatcgctataaaggatatactctttaccagctttgtcaggaaatgcatcaatattataagcagaatcatatctttgagcttgaaagagatttgtttcttaagacaacctttcaagattatgtaatgaagcctggccaagctgatttcgactttaatgaaaataaaagtcaattagtagagcttgataacttaaagggaagaatagcgctagaaggtgcattaccatacccaccaggtgtctttatcgttgcaccaggagaaaaatggcaacaaattgatattgattatttcaaaattttacttggcgcggcagctactttccctggttttgagccagaagttcaaggtgtttataaagattcgggtaaaattgttggagaggtattaaggaaataagaaaatatacttctattttgaataagcattattttatgttggttttaatctctaattgagttattttaaaatgtttttgctagaaaaaaggcactattatatcggcagatgagtaaattaactactgaaactgaattaagatttaacgtaaagactgttagtgttgaagacatgaccaacatgcttgaagatttaggttggaaagaaaactaagagtcaaaataagaaaaattctaactacgatgcagtagtaaagtcacatcgcaatatcgatcaactaagaaagccagtgtaggtaagttaacctatgctggtttttggtttactaatattttagctaataatttgcacatgatttattgcttccaaaggcaactttgatcctgatacaataattgtttcttgatcgtaataaccttccacaaagcctttaatatcaggtgataaattaccattttcatctaggtcttttagttgaagtgagatcagtctatgattacaaaaggaatctagcagaatttcactaattttatcgactgtcatttcagactttttaaaataattagtatttctttcaatattgctcttgctaatttttacagtatgatcactcaaaaagaaaccagaccatttcttcatgccagaatcctgataattacgaaagaactcatctagtttttggtcgaatgcatttttattcataagcattaccaccattatgtccaccaactaatttgctacgctgaatagctgttgcacctttggatagactggatgctttaactactgccgaaaagccgtactttttacgcaatttgtctactacatggtcaagcttgtatcttttgatctgtagttctggatcttccaggatatttaactgcatactgtggtcgggaactagctcgctatagctaacgccaatacggcgtacagcttcacctcgccaattttttctaaaaatagctagtaaagtttgtacaagttcatgattaacattagttggagtgatttttctttgaacattaaaaccatcgcgatcattatcataatctagttctgaaagggagaagccgatataaagactaaccttgcctgcacacaaattatgtgctcgaattctagctccgacttgttcgccgatttctcgaatgacaatttcgatttctcgttgctgagaatagtctctttgtaaaacttgtgagttgccatagcttttagtttttgggtgatacttatgactgataatactacgatcaacaccccagctttctgcaaatagctgctcaccaataataccaaattctttcttgagaatggctggatcagtgtgcgccagttggtagacattattaatgccaattctacgtaaatgattagcagtgcgagtattaatgccccaaacgtcttctaattttggaatacgccagatcgtatctggaacatcgatgtaatgccagaaggcaaccatagatttattgtgcttagcctcattgtccatggcgagtttagctaataagggattttcgccaataccacaagttgtataaagtcctagagtatcatggatatctttttgaattttatgagcaacattatatggatcattaccaaatagtttccaagaggttgtcatatcaatcatgccttcatcgattgagtacatatgaatatcttcatcagctgcatatttacgaaaaatatcgagtacctgcatgctgcgtttgatataaagattcatatgtggatcaactagcattaagtctggtgcttcttttttagagggtaagtttctagctctcatgacattgtgtaggttatattttttcttagctagaggagaagcagccataatcaagcctgatccccagggagcatctggctgtcttgaaataaccactaggcaagctttcataggattaaggcctaatcgtagggcttcgcatgatgcgaaaaagcttttgttatcaatcataaaaataatacgatgaggttcgtacttgaaatcatacataataccgtccgcctttagtaaactgcacgaactaacgtgcgcacgtttatattatataaacttttgttcgtgcgaacaagtgggcattttattttttaattataaattgagcggcgaaactataaaatgattcgtgtaaaaaataaatacatttttatttgactatttggaacgttccaattacaatgtaattagttgtttaagaaagcggttacaaaaatgaggaatgattatgaataaaattattaaaggagacacatatcgctttacagttattactgattcattaataagaatcgaacaagataatagtggtatatttgaagatcaccctacaacggctgtattacatagaaattttaaaaaggttaatgcagagatattaaaaaatcataataatcacattgttgagatcataactgatgcttttcatttgtattatgatggtggcacattcgctcctgatactttatatgcagatatcaaagtatcacaagcattacatgtaagcagatggcattttggtactgagaatgcagaaggtactaacaacctaaagggaactgctagaactttggatagagcagatggtgagattcctttagagaatgggattatgtctaaggatggatatagctatttcgatgattctagttcgtttatttatgataagaagaacgataagtattatccaagaagcaatgattcagtagatggatacctatttacttatgggcatgcatatcaggaagaacttcaagatttttatgagttaactggtaaaacgcctttaattccaagattcgcattaggaagttggtggagcagatatcatccgtatactcaggaagagtacaaaaaattagtagaaacatttgaacaaaagaagattccaattagtgtatcagttattgatactgattggcatagggaagatgacgttcctgctaaatatggttcaccatggactggttttacttggaacaaaaatctgtttccggatcatattaagtttttaagttggcttcatcaacataataagcacattggattaaatattcatccggctgatggcattagagcttttgaagatcaatacccagtggttgctaaagacatgaatttggatactgaatcggaagaacctgctgcttttgatctagaaaacaaacagtttagaggagcttacttcaaagatgtattacacccactagaaaatgaaggaattgacttttggtggattgattggcaacaaggctatagcttatctgataagaagttagatcctttgtggttacttaatcactatcaatttgaggatattgctaagcgcaagccggatgaggtaattattttaagtcgatacgctggtgtaggatctcacagatatccactaggattttcaggagatacagttatttcttggaaatcattagcctttcagccatattttacttctacagcttcaaacattggctacacgtggtggagtcatgatattggtggtcatatgatgggtgaatctgatggtgagctaactactaggtggttacaattcggggtatttagtccaataacaagacttcattcttcaaataatttattctctggtaaagagccatggaactttagaatggattatgaaaaatatcaagaaaaattccttcgtttacgttctaagctagttccgtatattgatactgctaattatcaaactcatgaaaatggtattccagttgtaaagccactttattatgactatccagagtcggatgaagcgtatgaaaataaaaatgaatatttatttggatcagaaatgttagtgtcgccagtaactaggccacatgataatgcgacacaagaggcttacagtactacctggttacctaaaggagaatgggtagattacttcaaccatcttttgtataagggtgatacaactattaaaacttatcgagattgtagtcaactccctgtttttgttaagaaaggaagcttgattgtaactaatcctgactatatggaagatattgacaaattacctgaaacattagatgttgaaatctttccaggtaagaatagtagttattgtctagttgagcatataaaaaataaagtagctaaaacaacatttgaatggaataatcaaactcgtattttaacgattaatgttgatgatccagcagatattatccctgaaagcagacagattcatcaaaaaataattaattatcaaaagtcagatgtaattaaagaagcgtatcgaagacttcaaacggcacaaactagttttgagctgaaacagaagctttacttagcattttcttcagataaatatcaatacgctaattttatcaatatgttaaacaacattaatgatgagaatctaagaaacagtttaagtgaattagcatattccagagaggcatatcatgagtagaaaacctactatgaatgatgtggctaaactcgctgaagtaggaagaggcacagtttctaattatattaacggtcaaaaagtaaaagaggaaaatagattaaaaattcaaaaggctattgatgagttaggatatgtacctaacttacaggctaaagaattaagaacatcgataaatactgaggttgtatttattgttccaactaattggacgccattcttttctgaaatgattttttatatgcaaaaacatctcgggcgatttggctataagatgattttggagaattcacatagtagtcccgaagaagaaaaagatattttacaaatggctgctttgaatcaggtggcaggtgtaattactatgtcttattctgatctttataattttatagattttaaaaagaaactgaacttggtatctatagagcgatttgtcgcaccggaggtgccattaataagcagtgacaataaagcaggtggtagattagcagcaaaaaaacttattgacttaaacttcccacactaaataagccagtaatctcttgatcttgcttggctttaggcttctatattatttttgctagttttctttaacaatttttgcatgtatttgggtaaacgattgataaagtcagccgtgaattcagctatttgtgcttcactggcatgaaagacttgctttacgctggccagcattgcatcagtaatcaattgcaaggaatggctaaaagtaatgtccgccagctcatcaatcatgcaatagaacagctcgcctagcgtgcgttcatcttcatcgtcccgcttggcaactgacataagcatgtagcgagtaaaaactatggcaacatgagcggtcaaagcatcgtaagacaggccatgatattccgtacttagttttagataacttttgcaagttttgaaaaaaacctcaatatcccaacgcttgccgtagttgcggataatttcatcttcgctaagcgacatgtcggtacaaatgattgccagccaatccttgcgattggcacggtttctaacgcagacaatccgtgcatctattttagcaccgtctttgtcctggcgtccgactttgactgggattgacagcaggtagcgagaacggccgcatcgctttttacagctgcgataaatctgtttgatgtttttgcgttctccctcaaattcatatttgattttggagctaaccttaaccatggcaatcacatccagcttcctttgcttgagctggacgatttgatgtggatttgagaaccagctgtcaaacagcacgtacttggcttgatgacctgctttcatagcttggtcgattaaattaaccatcacgtctgtgcctttagtccgggcaagcatacgtctttggccagcaatggtgcgctgatcaaaaactttattttcgccaatcatattctgtagcttctgagaagacagcagcactgaattgattggcatgaaagaagctccatcagtccagcccagggtcatcatgcgaaaacctttcttgtaagtcattgatacatggtcaaaaactttggcgactaattctgttttcttgaagccggtcctagagaagtaggaatcatcgacaacaaagcaatcagcccgtttttctgaagtcaaagatcgcaagtggttattaatgatttgcgcagacagaagtgtggtgaagtggagccaattgacgtgaacgttgcgcataaaacggtaatatgagttcttggaaaaattttcttgaaaatgatccattttcagctgcatatataagctgcggtcacgaaagacattgcttaaaacgtaaagaaacaagctgaacaggctaatgcctttttccttgcggaagccacattttctcaacagcttgatcacctgaaacttcttgatgaagctgatgattgagtttgaaaatagttggtcaggagatggtaaaatagacattggcacaagcctttcatgcaaataaattatgttttggtcaatataattatagcaatgaaaaggacttgtgccttttatatttgtcaaaacacgcagaatcacaatgaaacaagcaattttgcgtgtgggaagtttaagttattgaaatgaaaaagaaaaatatcccctgaattgtcaaattaagtgcaacagttaggctatgaggaaatatattgcttgaagagttcttctgctgtgtgatattgaaggattcgacgatgtttgcggttaatggcatcagttgcctgttgaacataagcttttgacttgtctttcatgctcttgcccttagggaagaattgacgcaaaagaccattgcagttctcattggtgcccctttcccatggagaatatgggtgagcaaagtaaatctggcagcccttgatcttggtcatatccgcaaactcagagccattgtcaaacgtgattgatttaaaccaggcaggatgtctgtcaatctccttttgaagcagcctttggcatgtgcttgcccgatagtcaggaatcttgataactacttcaaagcgtgtggttctttcagtcaaagtcattaaagcaggctgattcttgcgtctgacgcctttaaccagatctccttcccagtgcagcggagcttttctgtcttcaacctccttaggacgctgttcaatggaattgccaagatgcttcttgtgcaaagcgtgaccgccatggctgtgatgacgcttgttcctgcgtcttttgagcttcataggcagatcaatattgcttatgtccagcaagccctgatcaatatagcgatagacggttggtgtgctgggacaagggtagcctggcatagtccttttgaattcaccaacgaactcatcgatgctggtggcatcaaatttagctttaaagcgtctggagagcattctcaaaaagacagcataatgcttcaatggattgcgctgatagcagtttttgcgacgcttctcataataaatctgtgcagtatcagcgtaatagtgctcatacaataaatagctgctgtctctttgcaggacacttccgcgtttgatttcgcgactgattgtcgacttatggcagccgacttcttgagcgataacagtacgggaagttatgccggaatccagcattgcttgaatttgtccacgttgtacgctggttaattgatgatagtgcttagaaatgctagaatttgaattggtcataaagatcttcctttcttgatttttcgtcacttcaagtttaggtcttcatggcctttttgtttaacacttagtgttgcacttcaattttaaatccgggaagaaaaatatccttttaattagacgagatgtgcatcattataatgcaacagatattagagcaaaagtatttaaggaatacatgcggggtaaaaaagttaaagtagatgagttttctgcttcgcttaaagatacatatcggcaagagattgtggagttcttaaaacaaaaactaacttctaagcagtatgatggtatttttgccgtgaccgatgaatacgctctggttgctaaagaagcaataggtgtgattcagcctgatttgctaaaagaaatcgaaattattggttttgatggagcaagggggtctaaagaatcaagaataaaagtagatagtattcaacagccaattgaggatattgttaaagaagcagtgtccgttcttattcgaaaaattaaaggggaagaaataggtaataactacaaaaaaatactacctgtttcatttgtaaaagctgaaaagctaatgggagaataaatcatgaaattatggaaaaaagtgttgatgtgtagttcagttgttttagctgggttaactttaggtgcatgtagcaacgataatagtaattcaacttcatccaatgataataagaagcctattacgttgtgggttgctactgattatgttccttggtataagacttcagttaaacaatttgaaaagaagtatccgcaatataaagttaaagttgctcaaagtcctaatggtacggcaaacgctaaaactgatgttggtaaggatccaactaaggctgccgatgtattcgctgttccaaacgatcagttaggatccatggctgatgcaggatacattaacccattatctcctaaagatgtagcaaacattaagaagaatgatactgctgtagcatataaggcatctcaatggaaaggtaagttgtacggctatccatacactgcagatgtgcaattcttgtattacaacaagtcaaaattatcagcttcagatgttaaagattgggatactttaaccaaaaaaggagtagttgcaactgatttctctaatgcgtataacatttggccagtaatgttttcagcaggtacaaagctgtttggtgacagtggtgaagacctaaaaggttcaacaatggatagccaaaatggtgttaatggtttgaagtgggttgcagaacaaaagaataataaaggcgtaatgcaaaccactaatgcattgaaccagttaaaacttaatcatgcgcaagccatcttagatgggccatgggacgcacaaaatgttagaaagattctaggaaagaattttgcagttgctccatatccaacaattactattaatgggcacaagaagcaaatgcaggcattcttaggaattggttgttttggtgtcaactctcatacaaagaatgttaaagcagctaatgcattagctgaatttttaactagcaaagaacaacaattgattgtacacactaagacaggtgagactcctgtaaataaggctgcacaagctacagcagccgttaaaaatgataaagtcgctgatgctgttatgactatgtcaaagcctggttattcagtaattatgccaaagatgccacaaattacgacattctggaatgaatcagctccacttcttagcggtgtctatgatcataaagttaaacctgcacaatatagagctaagttggctaaattacaaaaagatatttcaaagaaataaatattttatttaatttaagtcatttctataaacagtattaataaaagcattttagaaaagtcaataaatcaacaatttaatgacattgttgattgttggcttttttgttattttagtaaaattaaaaaaatataaaataaatattgcttatataaaaaatagatgatattatttgttaaatttctttaacgagatttaataaaacttacaaaattagataggggatgcaagtatgagcaatttaacaaatccaaatgatcataaagatctgtcgtttttatttaaatcagtggatcgattggcagctttagaaacacaaaagaaggccgatacgattattagtgttcgcaagaagtgggtagctgccgcaatgattgctcttgcttctggatctaccgttttattaactagcaatactgctaatgctgcaacttcagatgttaactctgaagtgcaggtaacagcacaaaatcaaaacacaacagagaataagatgcaagctggagatacagctaatagccatgatactgaacaaaatgttacagtgcaggctaattcatctcaacaaagtaatcaagaagctaatacagctgatcaaaacaatacgccagagaatgataatcaagtacaaacaccaaccaatcaggctgatcatgttaaagggaatgttcaatctgcatgggaccagggatataaaggtcaaggtactgtcgtagctgttattgactcaggagctgatccaagccataaggattttcaaacaatgcctgaaaatcctaagctttcaaaggatgatattcaaaaaaagattgaacagcaggggtatgggaagtacgtaaatgaaaagttcccatatgtttataactatgccgatagagacaatgattacattacttctgatgacactaactcaaatgattctcctcacggtcaacacgtttcaggtatcattgctgctgatggaaaaccagatggtaataaagaatacgttgtcggtgttgctccagaagctcaattgatgcaattgcgtgttttcggtcagttttcagatgaaaaaactgatgatgttgctaaggctatttacgatgctactaatttaggtgcggatgtaattcaaatgtcccttggtcaaggtgttgcagatcagcaattaactaatattgaacaaaaagctgttcaatatgcaattgatcatggtgtgtttgtttcaatttctgcatcaaataatggtcattcaggttcagttgataatacaagtaatgtgacttctgtagaaagttatgaatctggaagtgcagatggtaattatgaaccacttaattcaagtacagtggctaatcctggtgcttctaaaaatgcattaacagttgctgcagagacttcagctactggtaaagatagtgacatggctggattttcatcttggggaccggtacaagactttactttaaaacctgatttggctgctccagggtatcaagttgtttctaccgtcaacaataataattaccaaacaatgagtggaacctcaatggctggtccattcgcagcagcaagtgctgcactggtaatgcaacggctaaagaaaactaatcctgaattaaaaggagcgcagttggttgctgctactaaagctcttttaatgaacagtgctaaacctcaaacgcaaaatgggtatactacacctgtttctccacgtagacagggtgccggacaaatcgatgttggtgctgcgacttcgaatccagtttatgtaattactgatgatggaacaagttcagtctcacttcatcaagttaaagaaaacactccatttactttaactttccataatctaacagatcaagaacaagtttatacttttgatgattttggtggtgggtatactgagcaaagggatagcgatactggagtttatcatgatgttcaattagcgggtgcacgtgtttatggtgaaaactcatttagtttagctcctaaagaaactaaacaggttacgtattctttaaatctaaatggcttaaacaacaatcaattagtagaagggtttttaagatttaccaatactaatgataaatctacagtttcagtaccatatttagcttactatggtgacttaaccagtgaaaatgtttttgatcaaaatgctaatgaagaacaccccgacatccagggaaatcgattcgttaatgaacaaaattatcctcgtggtgttgctgatcaagaatcattaaagcaacttgttaatgtagaaggcgattacaactggcaagaagttgcaaaattgtatgaaagcggaaaggtagccttctcaccaaataacgataataagagtgatcttcttaaaccatatacttatttgaaacaaaatgttaaggatttaaaagctgtggtccttgacgctcaaggtaatgtcgtaagagttgttgcagatgtgcaaggtgtagataagtcttatgatgaaaacggagtaactaaagatacaagcttatcagtttcaatgagagataatcctgatgcgtttgaatgggacggcaaggtatataatagtaaaactggtcaaatggaagttgctaaagatggtaattatacttatagattagtagctacactttggaatgaaggacctcatcaagtgcaaactgcagatttccctgtagtaattgatactgttgcaccaacattgtctaatgtgaaatatgatgaagccacgaatactttaagcggtgaataccaagatactggggctggctttactaattattcatatgcgacagttacagttaacgataaagtcttcggctataaacttagtgatagccagtcggcttttgacaatgctgaaaagacaaaaggacatttcagttttactttggacaagaatgcggttgctgcgttatcaaacgctgaaaataaggtaagtgttgccttgagtgatgtggctgataatactgcagtttacagtgttgatgtagcaggaaaagatattaatgaacctgcagttagtgtttggaatgctactaatggattagcatttgatcaaaattctactagttacaataaggatactaagacttacacgttaattggtggagcaaatcaagatttctatttgaatggtaaattagttcaggttcaaaatggtcagtattctgttcctgttgatgtcaattcaactaacttggtatttagcactgatgctactggtaaaaatgtgttaaagaatttctcaactgtaactccaaaagcattctttaattggcaagttactgacacttttgcaggtaactctggtgtttcaatcaactctgttgaaactaatcgaaaagatgatgtagttgttcaagctgctgtacctaaaggtgaaaatgtccaagcttttgctaaagattactttacaggtgaattatatacaggtgaagttaatgatggggtagctacattccatgtacatacttcaattaatggtggcaagcgtgcattattaactggttggactgttgttaatggaccatcttacaatgataagcaagaaactagtcaaagaggcgtagcaagttcaaatcacctaggtgtttactatgaagtagatgcagctgatcgtccagtttatactaaccgtaatcagttaggtgttgaagtaaaagacgaggcagcaaatgtggatgcatttggtccaggagcatatccaggacatgccccatctgatttgacgactagaacagctcctaatccaaacattcattttgattatatgaatgataatgatactactcgttttggtcaaaacgcagtattaaagggttactatgatcccactacaatgaagtttacggtaactggtaatgtagacgataatgtaactagcttaactgtcttgagtgatagttccaatgaaaatgaccctgcaaatcaagttaaactagatcaaaatggtaagtttagctttgccgtgactgcaaatagtactggtcaacgtccaattgcttatctttataggacgaaggacggtcaaactgttcgtggtacattaaatcttatcttagacacagtaaaaccaactcttgaagtcaaccaagttaatggtaatgaacttgagctttggactaataatcctaaatttgttttatcaggtaaggtaaatgataacttggatggttatagactctacgttaatggtaataacatttatcgtgaattcttaaactcaggttataatcgtttagaaggtttgaatactgatacagagttgacaaatccatatggcgatcatgaatttgagcaagttgaaaatcttaacgataataatgatcaaccgactactcatatctttactgttaatgtagtagatcaggctggaaataccgtcaccaagaagctaactgtgcattttgatcctaactatgttgtacctacagacaatacagatgtagtagttgacactagcacgagtgacacagatggagttactgaaacaaaaccaattgatcctttagtaggtaaatcatttaaattattgcataatgcatatctttatgatcaaaatggtgaagttgttttgactgatgttgagaatgctaagagcttgctcaaaaaaggacagacaatcgttgcattggataatgctaaagtaacatttatcaatggcgttaagttttatagagtaggcaacaatacttttgttaaaacggcaaatactgttcttcaagcacctaagagactcaagctgactcacaatgcttatgtttacgatcaaaaaggtaatgttgtcaaaaagcatggcaagaaagttttacttaagaagaatcaatggattagtgcattgaacaatgcagataaatatgtaatcaagggtaggttatattacaaattagctgatggtcaatttgtaaaagtggctaatactgttactaaaaaagctaagttacgaaaaactgtagtgagttagaaatacagataaatagtcaagtattgtaattttgcaatgcttgactatttttgtgcttgtagtttgttttgaattttcttctgtctatgacgaataagcttaacgatttcaaagtacattttttggagaataacatattagcacataagcgagaaactagactaatgagaagaatttagttataatatttatgtaaacggtttctgcaaaaatagattaaaaatctaaacatagaaagaaggaaacttgatgaagaaaattattaatgatccgcacgatgttgtgccagaaatggttaacggaatgactagatcatatccgcaatatattgaaaaaatcgaaggaactgaagctgtcgttcgcgcagataaagcatcaatgaaagatagagtcggaattatcagtggtggcggatcaggtcatgaacccactcatgctggttttgtcggtgaagggatgctcagtgcagctgtttgcggtcaggtctttacttcacctacgccagatcaaatatatgcagctattaaagctgttaaccagggtaaaggcgttttcatggttgttaaaaattattcaggtgatgtcatgaactttgacatggctaaggatttagcaagtatggataatattcctgttaaatcaattgtagttgacgacgatattgccgttgaaaatagcctttatactcaaggaagacgtggagtagctggaacgatcttcatgcataagattcttggtgcagctgctgaacagggagctagtcttgacgagattgaagctttagctaaaaaagttttaccaaatatcaagacgattgctgtagctctttctgcagcaactaatccagaagttggtaaacccggctttatcctgaaagaggatgaaattgagtatggtgttggcattcatagtgagccgggctatcgtcgtgaaaaaattaagccttcaaaagaattagttgatgaattaattggtaaattgaacgatgaaatgcatcttgatagtagcaagaaatacgcttgtttaattaacggcatgggtactactccattaatggaacaatatatttttgcaaacgatgtcttaaataaattagaaacttttgatattgaacctagttttatgaaggtcggtaattatatgacttcaattgatatggccggtatttcacttacgctttttgaaattcaggatgataaatggctagattacttgaattatccagttaaaacaattgcttggtagaaaggaaaaacaatggcattaactactgatacactaactatttggatgaataagttcgctgacaaggttaatacaaataaacaatatttaagtgatcttgatacgccaattggtgatggagatcatggctttaatatggatcgcgggatgaccgcagttaaagaaaaattagctactaaaccagctgatttaacttctggttttaagacgattgccatggcgttaatttcaacagttggtggtgcatctggcccgttgtatggaacggcttttctagaaatggccaagaagagtgcctcaactgatgatattggtgagttatttgatgctgcgctagctggaattgaaatgcgtggtggcgctaaaccaggcgataagaccatggtagatgtctggaacactttagtaccagaggttaagagtggcaatttaactgaagaaaaaatcaaagatgctgttgaggctactaaggatatgattgctaaaaaaggtagagcgtcatatttaggtgaacggtctaagggacacattgatcctggttctcaatcaagtgggtatctttttgaagcaatgcttgagacggagggcttgctatgagcttaggtataactttggtttctcatgtaccagacattgctaacggattacctaaattgcttaatcaagtagcaaaggatgtgccgattactgccgcaggtggtacaaacgacaatgatattggcactagcatggaaaagattatgacggcatttaatgaaaattctgccgatgaaattctagctttttacgatttaggcagtgcaaaaatgaaccttgaaatggccatggaaatgactgataaaaaagttcatctctatgatgctgcttttattgagggagcttatacagctgcatcacttattcaagcaggcgtaggcttagacgatattgaaaagcaacttaaaccgctgattattaaagattaatagaaagagggcattatgtcaggattcataggagagttctttggaactttagtcttaattgttttgggcactggttgtggtgcagcaattaatttgcaaaaatcgtatgctaaaggcgctagctggctttatgtaactattgcttggggcatggccgttacattcggtgtttatgttgctgccagtcttggctcacaggggcacttgaatcccgcggttaccattggctttgctagttttggctttttcccatggagtgaagttgggccatacttgttgggtcaattcttgggtgcctttgtcggtgctgctttagtcgcaattcaattttatcctcactttaaggctactaagacgcctgaagaaggaaacaatgtcggcatttttgcgactgcaccagccattaagaataatattttcaatttcttaagtgaaacgattgctacttttatctttgtctttgctttactcaacttaggcgattttgataaaggattaaagccaattgcagttggactgttaattatggttgttggtcaggctcttggtagcacgaccggattcgcattaaaccctgctcgtgactggtcaccaagattggcatacacaattttgccgattccaaataaatcatcagctaattggggctatgcatgggtaccgatggttggaccaattgtcggtggtgttttagcagctggcttgcaagcagttctaaaataaaaaattttaaataatacttgaagggcggacatttttatagtgtttgtccttttttcgacttctaaaaaaatttgcgccttttttgcgtaataaataatagagggttaaacatcctcaaaaatattttttaggaggactttgcatgagcaaagataaaaaactaaacgtcgcggaagtactgggctttactgatgatctgatgtttcagaacgtcatgaaagatccagagatttgtcgcatgttcttgaatgaggtgctgccacacttggacgttaaggacttaaccgtccgcacgcaggaaaggatcgcattcaatggctggggaaggtttcgattcttgatgttttgatcaccgatagccggggcaggcgctacaacgttgagatgcaggttgccaacaaaagagacatggataagcgcgccagacagtatctatttaagctaatggaggacggctttttgcggcgaagacaagaatatgaagaattgcatgcggcttatgtgatctttatcttgccgtttgacccaaaaggaaaaggcttgaagcggtatagttttgtttatactgccaaagaagacccatcagttgaactaaatgatggatctgagataatatacttaaacaccaagggagccaaaggtaaagtgaaaccaggtcttgacgatctttatcgcttgattgaaggcaagccaacttcaaatggtaagttcattagccgagttaaggagacaatgaataattatcgcagaaccgaagaatggaggaaacacgtcatgaacacggaagaagtcgcagaagcagcaaagcagctcggaatggaagaaggcaagaaagaaggcctgatcaccggagtgcaaaacttgatttctgttttgcgtgattatggtgaagacaatcaaaatattttacaacagcttaagcaaaagtatggcaatactttctccgataagcagttagaggatttcttgaagcaaagctaatcttctaataaaccaaaatagcgatagtaccaacgattgcggtactatcgcttttttgaaattaaaaaccttttaaaatggagagacattttgcttgaattttgtttggcataaaatcctcacgaatccctaaagtagagtagcaataaatctgctggctgggtattaatggaatagattttactccgggatagtttttggcagctatatccattaagaaaccaacacccatattttgtttgattagttgcaaagtagcatcgatactatcaacaactagttttttctttggtttaaaatttgtgttagtaaaaatttgttccagggcagttctagatagaaaacgtttatgtctcataattaaaggaatatctgcaatttgaaatagatcaatttctttttgctttgcgagcggattattgctgggaacaacgagattgtattggaaggtttcaagtgtggttaatttaattccagggagtttttcattgtcaagacgagaaaaaacaatggcatcatatcttccttcacgaagatgttgttctaaataatgagaattttcttcatgcgtttcaactgaagctagcaaatgtccttggttaagttgagtgatgacggaagctagccattctttaccagctaactcagaatagcctaaacgaaaactgttttcgtttgctcttttggcttctaaaataattgatcgttctttctgaattagcccttttgcgttacggtatacaactaagccagcgggtgatatagtcattcttttgtgattgtgggcctgaaaaattagttgggtaccaatttctttttcaagtcgcttaaccattgaagaaatagctggttgagttactccgaaaaattcagctgttctattatagtttttagtttctacaagtttttgaaaatactttaaatctctgaattccatttttaaataaatatctattattggatatataaattaaccgttcacaaatacattatagattatagcattaactaaactccataaatataatttatcgaaatatatatatcgcttatcatcaattcacaaaaatataaatttgattattttagattacttttcacatgtctaaagctctatgaattaagacaaaaaggttattttgtgaaaaagcgcttacaaaataatgcttgcactttagtttttcacatgatatttaatacacgacaagttgatttttatgggagatcaaaaaatgaaaaatgtaaaaaatattaagtggaatgcaagttatgatgtattggttttaggctttggcggagcaggcggtactgctgctagatttgcagcagacaataatgctcatgttctgttagttgatgtagctccttatggacatgagggtggtaatactagatattctgctcaacatgtagccatggctcatgatcgtgaaaagattggtaagtactttgatcaattggcagaaccatattcatattcaaagaagaccatggatgtttatctagacggttttgtaaatatgcccgaatactttgaaaaatattttggtattaagccatttatttggggtgatgacttccgagaaggtgatgccctagatcacaaggatcacttatgtgaatacccagaatttgaaggttcagatacttttgactttgctttagtgcataaccgcgactttgacgctggtctatggaaaaagattcgtaaggaagtagcagatcgtaaagataaaatcgatgtatggcttaattctcgcgctttagaactgattcaagacccagagactgatcaagttgtaggtgcaatagttgaacgtaatcataagagatactttatccatgctaaaaacggtgtagttgtttcaactggtggttttgaaaataatccacaaatgcaacaagattacttacatattcacaagttgaccccacttggtactttatataaccgtggcgatggtgtaaagatggtccaaagcgttggtgcaaagatgtggcatatgagcaactacgaatcacttggaattatcccaagctacgtgatcgctgaagaagagggcactcgtggtcgtcagatcgggggctggaagaatgttaagtctggttcagttattgctgttgctaatgatggttcaagatttatgaaagaagatgctaagttccgtcacggtcacatttatgatcatggcgaatacaacatgcctcatgcttttgacaatgcatggttagtctttgaccaaaaacaataccaaaaatttgttgaagaaaaagaaagcggtaagcttcgttacaacaagttatttgataagatgattaatgctactagcgtttctgaattagctgataagatgaatgttccggctaaaaacttgactgctacaataaaccaattcaatgaatttgctaaaaatggtaaggatcttgaatttggtcgtgccacagactcgatggatgaaatcagtactaacaaactttatgctctcaaattagctccagccgttttgaacactcagggtggtgcagaacataacgaaaaagctgaaatattgaataacaatgatcaaccaattcctcacctatacagtgctggtgaaatgggcggtatgtgtgtcaatcgttatcaaggtggcggtaatctcgctgaatgcttgattttcggtaagattgctggtgagcaagcagctaagatgaagtcggatacacaagaagttaaactagaaaatgctgtgccatcggttaatgatttaatagctggggataaaattgacaatatagaactaggtccagatcaatatgttggttctaccgaggctggtattggtggtcgaattgtggttagagttacttacaaagataaaaagattaagaatgttgaagtgcttgaaaatcatgaaactgagggaattggagcagtagctattcaaaaattacctgatgaaattgttaaggctaatagtacggaaattgatgcagtctcaggtgcttcaacgactactagagcagttgaagaggcggttaataaagcaattaagaaggccaaatagctaattttcacgaaaatgtcttagaatatcaataccttttttctgatagtcatttggaataaagctcttccgcatagcaatttgcatataagcccataacctttgatctggtatcaagtgaataatatgcaaatctcttctatctttaagtgtatcttccattgctaaagcaatacctacattttgactaactaagtcgatcattagttgcatagttctagctgtaaaaattatttttggagaaaaattacctaattttgcttcttgatctaagcattctctggtcagatatccttctgaacgcgcaataaagtcacgctgtgacagctcagaaattttaacttgctctttattagcccaaggatcattaagactagttattatgaccaattctgttttatttaaattgcgaatatagtaattagggtcgttaataggcaccatccaagaatagatagctacatcaatatctccattggttagactttcgaatatatctgctgatcgctctagatgcgtgtcaagcattgacattatgttagcctgatgaaattgagcgataacctcaggaatatacatgctaccagcaacaccagaaaaagagattcgtattttcttctcactggcatgcattacatcataattaacgctattaatttcatgtagaagcttaactgatttattgtaaagcaagtctccagcagttgttgtgttgagtttgccttttcggttaacctgttcaactaaaggatctttaaaatgcttagctagacgtttaacagctgctgagatcgttggttgagtaacgttaaaaaatgtagctgttttagtgtaactaccagtttctattaatttgcaaaaatacattaagtcttgattattcatcataaactccatttataaatatattttatatattgatcttttttgattataagttatgaacttcacaatcattataaaacttattatattgagatttaaagcaaaaaaataaatcattttattcacaaattcaaattagcatttaacgaaataatgttataaattgtaatcatcaacaaaagataagcgcttacaaagtttgattaataatttagggagtagaaaaatgttagataaatttcaatggaagaaatggattcttcctttagtaattggaattgtactgtggcttgtaacaccatttaagccaacagatattagtgtgccagcttggcatttatttgcaatctttgttgcaactattgcagcatgtattactaagccattaccaatgatggctaccactttaattgcagttgtgatagcaaccttaaccggtatatttaacatgaaagaagtggcggctggatttggtaattcaacctcttggatggttgctatgtgtatgtttttagcagctggatttattaaatcaggtttaggtaaaagaattgcatatatttttgttagaacttttggcaaaagcactttaggcttagcttatgctttatcatttgtagaaactgttttggcaataggtattccaagcaacaatgcacgtgttaatgggatcatgtatccaattatcgatggtctttctcgtgaaatgggttctgatcctgaaaagggaacacagagaaaattaggttctttcttagtgtttaatgaatatgaaatcaacaatgttacttccggtatgtttttaacaggtttggcaggtaacatggtagcgttaggtttggcaaaaacacaaggaattgaaatttcttggatggaatggttcctagctgctattgtccctggactgatttctttatttgttgtgccatttttattgtataaagtttatccaccagaagtaaaagagactccaaatgctcatgcttgggcagataaaaagttaacagaactaggtaaaatgacggctgctgaaaaaattatgtcagtggtctttgtagtagctattttgctctggttagtgggtccacatattggaattgatgcgactgaaactagttttattgctgtagcattacttttaattactggagtaattaataccaaagatattctaaatgaaagttttgcttggaatattttaacttggctttcagttattatgctaatgtcacaaaaattaatgactttaggctttttcccatggttctcaaaaacattgggtgcaggacttaagggcatgaattgggtattagttttagtagttttgtggttagtttacttctacttacactacttgttcccaagtgtatcaactcagatttcagctttgtatgctggttttttatcaattgctctaggtgcgggagtgccaaaaattatggcagcactaatgctagcaatgtgtggtacagtatatctttcaacttctacatattctgcgggccctgctgcaatggtttcttcaacaggatatatttctaataaggacttctggaagttaagtgcaattattggtgtggtattcaacattatctggcttggtggcggattgctttggactaaagttattggatactggtaaaaataggtgaataaaatgatatataattcttcgttaaaatgggacaaagtctatgatgtaattgttgtgggttttggtggtgccggtgcaggagccgcaagatttgcagcagataacggtgctcatgttttactagtggattcggctccagaaggtagcgaaggtggtaataccagatatgctggtggtgcttttgcctggggcagtaattttgatgatctaaaagattactacaaacaaacttattatccatttaaatacgatgaaaaagatttagatgcttttgttgagaatgttcttaagatgaaagaatattctaaaaagtattttggtattgaggcaaaagctacaggaagaagacctaagggtgaatatcctgaatatcggcatggggatgcaatgcaatcgcaaagtatgacccaagggatgtataatggcggtttctggaagctgctatgtaagaaagtttatgaaagattagatagaattgatatttggtttgattctcctgtagagcatttgattcagtcgccaaaaaatcagactattatgggcgtagtaattaatcgtaatggcaataaaagactggttgctgctaaaaatggtgtagttctaagctgcggtggttttgaaaataatcaagcgatggttcaagactttttaggtcaaggatctttggctccaataggctctttatataatcaaggcaaaggaattgatttagctgtcgaagcaggagcacgattatggcatatgtctaactatgattcgcacggtttatcattaagacagaatgacccacgtgaaaagtttgcctatatgattaattggaaatcattgtttaatggctcaatttttgtggcgggtgatgatggtacacgttatttccgtgaagatgaggaagatcgtcatggttataaatataatcatggcaattggataatgattcctaaccaaaatcatcctcatattgtaatggatcaaagacaatatgagcaattgagtaacgatacttctgcgaaggcaagtcaaataaaagaattaatttcttacgcaattaaagcaaatacgattgaagaacttgctgaaaatatatccgctcctagattaaagcaagaagttgcagactttaatttcttaactgatgtaaaaaagcgagatatgtttcttcatcgaaaaattgatactatgcgtagttttggaaaaggaccatattatgcaattcctgtaagacataatattcttcatactcatggtggagctaaaagaaatgaaaattgtgaagtaattgatttaaatggcaaagttatccctcatttatatgaggctggtgaattaggtgatatttttgctactaaatatatcggtgctaatagtattgctgacttattgatttcgggaaagatagctggcgagaatgctgctaagcccaaggatcaagaggttgaattagatgcagttactggtgcctctaaagttgctgatttgaaatccgatgctcatactatgatagccaattttgatgctggtaaaaatcagggtataggtatcagttcaaatggaataagtgatttaccgattgtagttagagtaacacttaatgataaaaatcaacttaaaaagattgaaactctacaacagaaagaatcaccatcattaggaggaaaagcaattccagttttaaccaaagcaatgattgctaacaatactactgatgtagatactgtgtccggtgcttctgttactagtcatgcctttcaagaagccgtatctgatgctttgaaacatattcaaaaataaaagttaataaaccaaaaagagcgatagtaccaatgatatagtcctactttagtagacagtacaaatatataaaattgtactatctatgaaagcaggactttttctacgtaaagtcaagcgcaataaggtgtttggctttattttttacctaaattttgtcatgagtatcttttagtggcgatttatttttttagaaagcatactaaataagcccacctctatatttaatttatgggcttagcgttataatgtacttgatcaattaattacgactaaagtctttttggttatgtgtggctacgttgtaatcatatagttgatcattgataatcagagcataaatggttctgattagtttatgaattgaagcaatagctatctttttgaaccctttggtttgagaggatagctttttgctttcataataatctgctatatgacacggatttgtcttagctgcattatcaatttgtccaatagctcgataaagcaacttacgtgcgactgcattgccatgtttagtaatacttaaattagagtccatttctcctgactgatatctgcctggatcaattccgataaaagcattgattttattaggattactaaatctgcgtaaatctcctaactctgctaaaactctgacagcagtggtctgtgcaaagcctggaatgctttctaggttttctaaatcatgattgggaaaagacttcgctaacttaaccattcttgcgattaaattttctctttgatcacttaaattaagcaatctgtgtgcataatactgcacttgctcgacttctatgctagagcaagatacaactggataagcttgataagctaattcaattaatttatctgcagtccttagagcgtgtttaaaagcaatcccctttaagctcattaaccagttaataagctgttttttatcttctcttcttactaagtcacaatgaggatatcgcacaactatttgccagtaatttttacctttagcagaagaaaatagattttcaatttcaggaaaagtcgattgtagagcttggtgaagtcgatttttagctattaccaagtcacttgtcagctggtcatagaagcggctcaaagcattaagctgcttataagtttgggattcgctttgattaaccggatggcgataaagtctttgaattaaggctaaatgataagcatcagttttatcggtcttgttgtagcgtagccccatattcatagccgtagtcttcaagaaaagcctgcagtctgcgtgaataaacgccggtagcttcaaaaataatttgcggatgtttagaaaaagcggttaattcatgaagcaattgaataaaaccaggacgattattagtaatggttagttcatttttgctttcaccaattagttcacaaacagtagaagtagacttgcttacatcaattccaaaagtaacttgcataataaaaacctccaaaacttagtagtaaaacgtatttacttaagaaatcagatctaattttctaaactcgacatctagtgtccacattcttcgaagagactattgaaaacttaagtaaaactgccagttttgtatacgacatcaagtgtctaaagacctcagggcatatcgttttactactactttaattctacaaaagaataaaaatagtgaatcaattatcccgtcggataactaattcactatttagcttagaatgtttactatgtctaaatttaataaagaacaaaaaatagaaatttatcataaatggaaagatgaaaatatctcaatcagtcaattggctaaagcgtacagaatgaatctagctaatttagactatatgcttagattaattgatatgcatggaatagaaattttaactactaaaaaccaaagctattccaaagagtttaagcagcgaactattgaacaagcaatctttggcaataaaccatacttacagctgtctttggaactggggtttaaaagtattggcatgcttaacaattggattagagaatataagaaaaacgggtataatgtcattatcaaacagaaaggacgccctgcccgtgaccaaagaaaagcagaaatctcgcaaggaactggagaaagagatccagcagctgaaagaagaaaacttgcgattgcgtattgtgaacgaatacgtaaaaaaactaagtgccttggatcaagaagatcagaagaaatagctagggtgattacggatctaaggcaagaattcaaagttagtttaaattatgtattagctgcgattgcagagcaccctgagctacctataattgccagaagctcatactacaagattatcaaacgacagcccgtcaagcctaaacggtcaaagcttattgctagaatccatgagatttttaatcatcatcaaggccgctatggatatcgcagagtagctttgcagttaatcaaagagggctggaaagttacggagaaaaccgttcgctattggatgcataaattaggtcttaaaggcatcaggcgcaataagcgcaaatattcaagctataaaggtactattggcaaaatagctccaaatttaattcatcgtgatttcttcgcagccctgcctaacacaaaatggtatactgatatcactgaatttcatcttaataatgaaaagctttacttattgcctattctagacggctgcggtggcgatatagtttcttatactatctccaaacatccagatatggatttagtaatgacaatgcttgacaaggcttttgccaaagaaacagctcttaataactgcatttttcatactgatcagggctgtcagtatcaaagccctcgttatcagcgagctttaaaactccatggtattactcaaagcatgtccagaaagagcaactccatggatgatgggctaatggagaacttctttggcctgctcaaaactgaaatgttctatgatcaagaatacaagtatcataatcttcaagaattaactcaagcaatcgaggaatatatcgaatactataacaacgaaaggataaagagcagattaaaaggcttaaccccgaaagagtatcgaagtcaagcctctattaatccaatattttaattgtctactttttacgtctcagtacatttttacattaattactattatttttcttcttaattagttaatttaaaaagttctggtcaaaacctgacacctttgacacttttcctctcaacaccttgatactactagctttatccatcatatctccattgacaccaaaacaattcaaaagctacccaatgcttgatataacaataatctgctagtgtcaacttaaccaacaccagaccgacaccatttgagttaataactgacacttttcaaatttcaagattcggtgtcaacaacggtgtcgcacatcgactaaaatgtgtcagctaaaccgacaccaaattttaacttggctatgtagattctcaaccattcgcactatattaaatgcaagcctgttcaaaaacttttagctttttgaatgaacgtgctgggcctacaacatcaagcttaaatgatgttcagaaacttatggtcaaaaaggatggattgaaatgacggaatatggctatgctagggtgtctacaaagggacaagaactagcagatcaaattaatcaattgcaaactgctgggatcagtgaggattgcattttctccgaaaaatttactggaactacaactgaccgaccacaatttgctaaactaactcaattggcgaaaccgggtgatgtgattacggttaccaagctggatcggttagctagaaatacccggaagcattaaatgttattgacccactaatgaatcaaggagtgaagatcaatgtacttaacattggcatgttggaaaactcaactgtgggtaaattagttaaaacaattctcttagcagtggcggaaatggaacgggatatgattgtggaccgcacccaataagggaaacgttatgctaagttacaccggtctgattatcatgaaggacgaccccaaagagccattaccccgcactaccaagccgcttatgagtacttgcttactcattcctacaaacagactgcgagtgcttttgatatttcgatttcaactttgcaacggatccgaaagcaggtggagcaaaataatatagcttagttttaaaaaagtatatattattttgcgctggaggatttgaaaaatggtaaaatgttataccccatttatttactggattgatactaccggtctagactggcaaagcgatgaaatcattcacctaaccataacggatttatttggtaacattgtgttctcacatctgtttaaaccagtgaaaattgaaagttgggacccaactcagcagggtttccacacaaaagcacttgcccccccacatattcaatatataataaattacgcgtggtgctagttaagtcgttttagttaataaaaaagtccaatcggattagactcaagttgtaacttaaattaaatagaaaagagtctgatctaattgaactatctcaagcttaatcgtttttctcaccatttacaagttagctttgctcggctaaatgtaatttgtcgttctttgtacaagctttgtgctcctgatgagctgaaataccgtaaaaatattgatcaggttaagctcttagacagttctattttagcaatgcttatttggcaaactgaaattggtatcgaatctcaaagaagattttgtaaattctttgtcggtttgtctcattctcgctttaatcgtcgggcacgaatgcttttgcctttaatgcgctgtatccgtcaagattggaatcaagaagtaaaaacagctggagaattcttaattattgacagcttcccagttccagtttgtcagcccatccgcaactatcgcgtcaagatctttcgtggcatatctgatatcggatataaagccactaagaaaatctattattacggcttcaaggttcacgcgatagtaagtgatgacggctatgtgctttggacaccatatcgaagaaacatgaaaggcgctaaaaagcataacgatcatcaactgatggcaattagaagaacaattgagagcgacttttctttgcttagctactataacgctgaaaataactgggcaaggagcttagctggttttcagcagcggctagaaatagccattttggcttataatatagcatattgcctagaacgatttaactagcaccacgcgtaataaattgcgtcttagaaagaggatataaaatatggacaaattacataagcaacaagtagcaaaacgacaacgatttgccattaagaaattaacagttggaacggcatctgtccttgttggcttaaccttcattattagtggtaatgccaaggcagatacgacagttgctgctcaaaatacattcacgactcaagtgactgatccacaagttagtgcccattcaagcaatattcggattagcgacgaatcaaatacggttgttcatcaaacttcatcaacattagttccaaataaaacaacaacgccagcgcaacaaatgccgataatccataaaacacagcaaaacaaccactgcccagtaagtacaacaaacacagcaaaacaaccactgcccagtaagtacaacattactatgaattttcgcgatgtcaccctacataagccaattcaagtgattagtaatggtcattatgtattcaaacaacctttcaagcagaccacaattcgaccaggggatagtgtggatcaagaatttactgtggccggttataaattaatgaattcagaagttttgaataagtatttctattttgataaacaaggtaatgcctgccttaagaaaggtattactacgcaagacattaacattaatttagattacgcatcattgtcaccaatcaaagtagagtatgttgatgtagataacgggcatattttagcatcaatcgttctagatagtttctggatggcccctgaatctccacaacaccgtgctggtgataagaaagcaccggatgcatcacgctatgaagccgcagccattaatattcctggatataaattagtttctgaacctgttttaaagggtaaaatcactggtcaaactcgaaattcgttagctgatcctaactatgtttatttaactttcaagtataagaaggttttgaaaaataattctgatagtaataggactgaattgttacttgttccagaagaagcaaatctaccgaacaaactctttacgattgctggtagctatggcgaaaggattgacctaaacaatggtaattatgagaaaaaaatgagtgaggagattagccattacgaaaaacaaggttactcctatataggaagtacagggacatatcttaattctgattatttcaattggtacgctaaggggatacatgtttacttgctaccaaacaaaccagtaactgtgcgttatattgatgagcaaggaaatatgcttaggaataatgatacgcttgcgttcaacctagataatcccaaccaaaaaaataatggggttaatccgcaaaaaggctggtatgcaaatggttcatggcaagtccaacctaagaaaattaaaggttatcgtcttgttcgtactcttggagtaacgagtggccagtatactgtataccaatacaccacaacttttgtttacactaaggacacagatccaactgatcccaaaacgccagagacaacaacaacaacaactgatccaaagacaccaagcgataagcttccggacaatcctggcaagtctggtcagacagttccagttaatattcacattcctgatggttatcaattagttcctggtgaaagtgttccaacattttacaccttcaaggatggtaaccctaatcaaatcattagttgttggttgatcccaactaatggcggtcaaccaacaactaatgatcatcaaggacaaggaacaccagctactaatacgcctacaaacactactcctaatggaaatgctgttactggcaaactagaaggtaatgttcctaacatgcaaactgggaagacgattacgtttcaaccaacgacagctaaggataaccaactaccacaaactggtaatgacaatagcttaacaaccgttgccgggattattgtaagcctgttaaccagttgcttagctgttcttggcattaataaacatcaaggctaatatgattacctaccaaccattccgaagctaatcaagacgcgatgctttaattagcttcggaattttgaatgatatatcattataataggatggaataaactttatataaatataagtaatggggattgatttctaatcttttaagaatactgtttatggttgattttttatacaatgtttccaactgagagtaaatataaaaagggagatactatgttatcagcaaagaattattacggccgtctggtaaagttaaaaccaaaacaagatcatttttcacttcgtaagttatctattggtcttatttctgttaccataggtattaccttatacttgggagtggacaactcctatgttatggctgatacgaatttgagggataataacaatcaacaattagccggatcgggtaatggcaccaatataataaatgataaagttaaaattccaaccggtgcttttcagtctaaacaaatgcaaactgaaaattgcaaagtaaataatcagatgttggataaaactgaagtaacaaattctactaaaaattcttctacactaaatgtggaaaattccaagactgctgatttgtcgagatttgattactctttatatacaaaaaaagtaaagagttttgaatttagaaattcagataataacgatgtaattagaacagtaatattaaacaaacctaccggtgttgaaactgtaactatgactttgaatgttagctgcttaaaagggagaaagcatcagcatcgatcgcacacatctactagatcgagtatttataattataaacctcaagttattgctgaagtaaatacatccaataatccattgccaaaaatatcaattttggagaaaaacgttttaccaaaaactttttttcaagtagataagaatacatttcttactcaacaggataaagagaactatgagaaatttatatcagttaataagaatgatattagcatagaattaccagctttttccattaatgatattgatattccaggctattcttatcatattaatgcaaaaaagactactcctggagcaggattaggtaaagaaaagttttacatctacactgaatcaccacaaacagttgttatcgactataccccgattacggttaaggttgaacataagatcatcacggtaacaccaaccgatccgaagacaccaagcgataagcttccagacaatcctggcaagaactatccaaagggtgttgataagaaagatctgaacaagactgttaagcggacgattactgttaataaaccagctggctcaactgttgatgctagtcaagagactactctaactcggacggctactgttgacgaggttacaggccaagttacgtatggcaaatggacaacctcaaagcttgataagtataatgcaccagaaattccaggttacactccaagtcaagcagaagtccctgcagttgatcaggtaacggttgattacacagatccaaaaattgaaattacctacacgccaaccgaacagactgggaagatcacatacgttgatccaaacggcaaagaagttggtactaccccattaacaggaaagacggatgaagagattccagttacaccaaacgttcctgcaggttggcagattgttcctgatccaaagattccaacaaagatcaccgctactccagacggcattcaaacagttacggttaaggttgaacataagatcatcacggtaacaccaaccgatccgaagacaccaagcgataagcttccagacaatcctggcaagaactatccaaagggtgttgataagaaagatctgaacaagactgttaagcggacgattactgttaataaaccagctggctcaactgttgatgctagtcaagagactactctaactcggacggctactgttgacgaggttacaggccaagttacgtatggcaaatggacaacctcaaagcttgataagtataatgcaccagaaattccaggttacactccaagtcaagcagaagtccctgcagttgatcaggtaacggttgattacacagatccaaaaattgaaattacctacacgccaaccgaacagactgggaagatcacatacgttgatccaaacggcaaagaagttggtactaccccattaacaggaaagacggatgaagagattccagttacaccaaacgttcctgcaggttggcagattgttcctgatccaaagattccaacaaagatcaccgctactccagacggcattcaaacagttacggttaaggttgaacataagatcatcacggtaacaccaaccgatccgaagacaccaagcgataagcttccagacaatcctggcaagaactatccaaagggtgttgataagaaagatctgaacaagactgttaagcggacgattactgttaataaaccagctggctcaactgttgatgctagtcaagagactactctaactcggacggctactgttgacgaggttacaggccaagttacgtatggcaaatggacaacctcaaagcttgataagtataatgcaccagaaattccaggttacactccaagtcaagcagaagtccctgcagttgatcaggtaacggttgattacacagatccaaaaattgaaattacctacacgccaaccgaacagactgggaagatcacatacgttgatccaaacggcaaagaagttggtactaccccattaacaggaaagacggatgaagagattccagttacaccaaacgttcctgcaggttggcagattgttcctgatccaaagattccaacaaagatcaccgctactccagacggcattcaaacagttacggttaaggttgaacataagatcatcacggtaacaccaaccgatccgaagacaccaagcgataagcttccagacaatcctggcaagaactatccaaagggtgttgataagaaagatctgaacaagactgttaagcggacgattactgttaataaaccagctggctcaactgttgatgctagtcaagagactactctaactcggacggctactgttgacgaggttacaggccaagttacgtatggcaaatggacaacctcaaagcttgataagtataatgcaccagaaattccaggttacactccaagtcaagcagaagtccctgcagttgatcaggtaacggttgattacacagatccaaaaattgaaattacctacacgccaaccgaacagactgggaagatcacatacgttgatccaaacggcaaagaagttggtactaccccattaacaggaaagacggatgaagagattccagttacaccaaacgttcctgcaggttggcagattgttcctgatccaaagattccaacaaagatcaccgctactccagacggcattcaaacagttacggttaaggttgaacataagatcatcacggtaacaccaaccgatccgaagacaccaagcgataagcttccagacaatcctggcaagaactatccaaagggtgttgataagaaagatctgaacaagactgttaagcggacgattactgttaataaaccagctggctcaactgttgatgctagtcaagagactactctaactcggacggctactgttgacgaggttacaggccaagttacgtatggcaaatggacaacctcaaagcttgataagtataatgcaccagaaattccaggttacactccaagtcaagcagaagtccctgcagttgatcaggtaacggttgattacacagatccaaaaattgaaattacctacacgccaaccgaacagactgggaagatcacatacgttgatccaaacggcaaagaagttggtactaccccattaacaggaaagacggatgaagagattccagttacaccaaacgttcctgcaggttggcagattgttcctgatccaaagattccaacaaagatcaccgctactccagacggcattcaaacagttacggttaaggttgaacataagatcatcacggtaacaccaaccgatccgaagacaccaagcgataagcttccagacaatcctggcaagaactatccaaagggtgttgataagaaagatctgaacaagactgttaagcggacgattactgttaataaaccagctggctcaactgttgatgctagtcaagagactactctaactcggacggctactgttgacgaggttacaggccaagttacgtatggcaaatggacaacctcaaagcttgataagtataatgcaccagaaattccaggttacactccaagtcaagcagaagtccctgcagttgatcaggtaacggttgattacacagatccaaaaattgaaattacctacacgccaaccgaacagactgggaagatcacatacgttgatccaaacggcaaagaagttggtactaccccattaacaggaaagacggatgaagagattccagttacaccaaacgttcctgcaggttggcagattgttcctgatccaaagattccaacaaagatcaccgctactccagacggcattcaaacagttacggttaaggttgaacataagatcatcacggtaacaccaaccgatccgaagacaccaagcgataagcttccagacaatcctggcaagaactatccaaagggtgttgataagaaagatctgaacaagactgttaagcggacgattacgtctcaaccaacgacagctaaggataaccaactaccacaaactggtaatgacaatagcttaacattaatgggcttaggtgcctccaccttattggaatgtttggccttgctgctgtaaacaagaagcgtaagtaatcaaattagctctacaattttatccctttgtcagtactgatgaggtattttgatgaggttagtttaagtagcgaagctgcttgagctgaccttttcttttagcttagtttttaccatgagatttgagagctagtagacttcggatacgggaatgatcaaagttgcgaaaaccataagctgttattctagtggtcttaattttattattgtaagcagtcgttatcaatacgggttgaacaaagggactctacaattgtaagtactgatgaatttaacatcagtgcttattttggttttctacgaatagtcaaggatattaaaggaattccttggaatttagctggatagaaaagttaattaaataattaaaatggctcaaagttaaatttaaagtataacaaaacaagctcatgaactagatttattgaacctgtcaaatcttttgtgtaaatagttctttctcgtaaattgatttttgaattatttattcaaaataagattctaaggtatcctgaacctgaccaaagcctttatgaattcggttgaaatagcggtcattgtagctcattgcctggatgccaataaatgcatcaagcgactgttcagttggaaattctgccttaggcttagctttacgcttgatgacgttgttaaaggattcaatcatattggttgaataaattgaagctctgatttgtttgggataattgtagaagaccagcagatcgggctcaatttccttcaaacctttgatgacattgctataagctttattccatctggcatagaatttgtgcaagacagctgcagcttctttttggcttgtctgttgatgtatctgcttgaattcgttcatgatcttttcgcggtcatccacccggactttagcacagatattgcgcatgacatgaaccaggcagcgttgaaaatgagctttaggataagtcctggccaaggctgttttcatgccaacaacaccatcagaaagaaagagttcaacttgcttcaagcctctggacttcatgttttgaagcatctctgtccagacttcaatgttctcactaggagcaatgcagtagtcaatgacttccttatgtccattaggtttaatgccaatggcaatatatactgcttcacgctcaaacgtttctcggcgcaaaggaaggtatgtcgcatccaaatagacacagaaaaacttgtcgcttagcttgcgcttgtgataagcctcaaccttggggagcatctgcttggaaatatttgatacttgagctggactataatgactgccatacattttctcaatcaagtcagcgatttctctggtagttacgcctttggagtagagcttgataatcgtgctttccaaaacatcagagtgctgcttgtagtcaggcagcgtgtgctgatgaaactgaccgttgcggtctcgaggcacttgcacttcaattggtccaaactgggtatcaaccttgcggaaataagcaccatttctagaattgccagtattccagccatttctggcatagggatcatagcctagaaaggcagtcaactcagcttctagcaagttattaacagcctgttgtagctctttgcgcaataaatcatttattttgtctggattgaatagagcttgagcaaaatctttggtaaaatcattcatgaaggagttcttctttctgtatgtgtttttttgttcaaaccaatcatacgagaaaggaactcctttttctaatgtttaaagaaataaatttaaggaatcattcatccttacacaaactattttacagtctctccaaagagtttaagcagcgaactattgaacaagcaatctttggcaataaaccatacttacagctgcctttggaactggggtttaaaagtattggcatgcttaacaattggattagagaatataagaaaaacgggtataatgtcattatcaaacagaaaggacgccctgcccgtgaccaaagaaaagcagaaatctcgcaaggaactggagaaagagatccagcagctgaaagaagaaaacttgcgattgcgtattgtgaacgaatacgtaaaaaaactaagtgccttggatcaagaagatcagaagaaatagctagggtgattacggatctaaggcaagaattcaaagttagtttaaattatgtattagctgcgattgcagagcaccctgagctacctataattgccagaagctcatactacaagattatcaaacgacagcccgtcaagcctaaacggtcaaagcttattgctagaatccatgagatttttaatcatcatcaaggccgctatggatatcgcagagtagctttgcagttaatcagagagggctggaaagttacggagaaaaccgttcgctattggatgcataaattaggtcttaaaggcatcaggtgcaataagcgcaaatattcaagctataaaggtactattggcaaaatagctccaaatttaattcatcgtgatttcttcgcagccctgcctaacacaaaatggtatactgatatcactgaatttcatcttaataatgaaaagctttatttatcgcctattctagacggctgcggtggcgatatagtttcttatactatctccaaacatccagatatggatttagtaatgacaatgcttgacaaggcttttgccaaagaaacagctcttaataactgcatttttgatactgatcagggctgtcagtatcaaagccctcgttatcagcgagctttaaaactccatggatgatgggctaatggagaacttctttggcctgctcaaaactgaaatgttctatgatcaagaatacaagtatcataatcttcaagaattaactcaagcaatcgaggaatatatcgaatactataacaacgaaaggataaagagcagattaaaaggcttaaccccgaaagagtatcgaagtcaagcctctattaatccaatattttaattgtctactttttacgtctcagtacagtgctttcgaggcttttcttttatattattttttcttagaaatagagtcacggatatttaattgactatggcaagtgatcgtaagtggaatttgaatatcttccgtaattagatctttagccaaacgaacggcagtcttgcccatttcttcagtattcatatagacactggatagggtaggagttaagaagcgattgatatctacatcatcaaaactaacaacagagatatcgtcagggatgttaacacctgcatcactaaaggctttataaacacctaatgccataggatcactaccgacaacaacagcagtaggacgttgttgcagttttaagatctcttttccagcttcaaaagcagagttagttgaccaatcagtaataaaagaatggcagtactggtcaagattgtggagtttcatccaggacaagtaagtgagttcacgtagatcatttttttcacaagcaatcttaccgtcaagatcaagaaccaatgattttccaccgatgtaaacaatgttcttgtgtcccaggttatagagggtatcaagaatatgagaagtttcttccacaaaatcattacgaacgatattacaattatgaatattggtgttgacgtcgataaaaattatatggggattaatgctttgaatctgcttaattgctacaggtgtcatttcaccctcgattagcactgcgccaaatttagctaagtcagcccaatttttattatcatcttctattctaaaaggttgctcaatacgtaaatgccatttcttggcttcttcattaatgcctttatgcagattgagaaaatagggatcggtgatttcacgagatttgttataacgcatgattagtgcaatcgagagctggttatcagtttgcttgggaccaggatgtttttgagatttcgaataatgcaggcgtttggcggtttcgataacgcgggcacgactagcctcattgattctaaaagttggatcattgtttaaaattcgtgatacgctagctggcgataccccagcaatacgtgcaatgtctctaatacttgccataaagatgctccttgtttgtttactgtttacattatacaacttttagcaagaaactggtgtataccgaacttgaggataatagtttagtgtccataaagtaagtcatattgaatcaatgttacttactttatggacactaaatttacttattttactacactacatagtaaagtgtagtaaaataagtaaaaaagcaattgaaaaagaagaatatggaaataataaaatcttaataatttgttcgcttgtttttatatttgtaattcattaaacttatgttcgaaataatgaaaggagaaatatatttttcaattgtaggtaatataattccatattcgtatattgacagtacttatgaaacaaaaatcattgattagtcaactagcaaaaatacataacggtacaattactcatcgtgaattagcattaaatggagtatcaagttatagtatttcgaaagctgttcaggatggtacgttagaaaaaatacgtccgggaatttatttatttggtgatgataccgaggatatattttatagtttgcaacaaaaatataaaaaaggaatctattctttagaaacagcattatatttatgggggttaagtgatcaatatccttttagcttagatatgacttttcctaggggctacaataatccaactttggatattgaaataaatccacatattcaaactaaaagtttggctactcagggaataactcaaactgaatcattcaatggaaatgtgattaatctctatactcctgaaagaactctagctgaaatattgcgaccgattaatgctgtagatatcgaaataattaccaatgccttcaagatgtggaataaggaaaagaaaaaagacataaatacattaatgtcttttgcagaaaagtttagggtaactagaaaggtaaatagctacttagaggtgttgttgtgaaaaattatgttgatgagaagcagttcaaagcagatgtaagaaggtatgctagagagcataatataaaaggaaatgagattggtcgattatggcaagaaattatgttagatgatttgctagaaagaatttcagtatcaaaatatcgagataatttcattttaaaaggtggttttttgttgtcggctattgttggtatcgataaaagatccacggaagacattgatgctgagataaaaggattagatttgaccgaaaaacaaatagctaaagtatttgaagaaatctgtcaaataaaattagcgggggatctattaagcatttcgttgtcagaaattgaacagattcatgagcatgaagagtacaagggctatcgattacattttaatgcttcttttcggaagataagatatccattaaaagtagatgtttcaacaggggatgttattacacctagggagattgaatatagctataaattacatttagaagatcgacatattaatatttgggcatatactatggaaactatagtagcggaaaaattagaaacggtaattacgagaggaatagctaatacacgtatgaaagatctctatgatttattcatactgcagagagaacgaatcaatttagctactttaaagtcagcttttgctaatactacgaattaccgtgaatcaatcttttggacaggacaagatatagattataagtattgtctaagacaagtagatattattgctgaaaatagtaatatgcagaatctttggaatagatacgtgagaaaacatccttttgctaagggaatcacttttactcaagttattcaggcagttcaaacttggctaactaaattagagtttgaaaaataatttcaatcaaaaatgacgctagttgatcgaaccagcgtcatttttttagataatagatgtagaaaatagtttgaaaaacgattagtttttatagaaatctttattatactttacttgtcttcgtagccctttgggtgactcttgtgccagttccaagcagttgcgataacgtcatcaacactttcatgctttggcttccagcccaaaatagttcttgctttggttgaatcagcaaccaaagagtcagggtcaccgccacgacgtggacccattgtgtaaggaatatcaatccctgttacttttttagcagcgttcaaaatttcaaggttggagtaaccttgagcagtacccaagttaaagacatctgacttattagtctccatcatatgtttcagtgccaaaatatgagcatcaattaaatcttcaacttgaacgtagtcacgaacgttggtaccgtccttagtgtcatagtcatcaccaaagatagtaaacttaccatccccagaaattgcactcttcaaaatatttggaatcaagtgtgtttctggtgcgtgatcttcaccgattgtgccatcacttgcagcaccagcaacgttgaagtagcgaagagcagtgtacttaataccatcagctttatcagcccaagccatgatcttttccatcatcatcttggtttcaccatatgggttgattggatcaagtggggtgtcttcggtgattggcaatttcttaggaataccataagttgcagcacttgaagagaagactaagtatttaacaccagcgtcattcatagcttgtaataatgaaatcatgccagtaacgttattgtcatagtacttaagtggctttttaactgactctggaactaatgaatatgctgcaaagtgcattacagcatcaatcttttcatcacgtaaaattttgcttaccaaaaaagtatcttcaatatcgccttggtaaaacttagccttaggatctacagcctttctgtgaccagtatataaagcatctaagacaacaacatcattgccttctttaactaattcgcgtacagcgtgtgagccgatataacccgcaccaccgacaactaaaactttcatgttttgcgctcctttattttagttattatcttttattgaaatcgattacattataacacatattttagtaaataatttactgattttaaataaaatatttaaaatcaaagcaatttaaatgaaaattcgcaatcttggctaggattgatccgatatttgtcttcaacattgctgccccaactgtcaatgccgccaacaccgcggacagcaccagcaattaccaaaacagttctgcgggctaatggcagttcttcaatatgagttgcattttctagttcttctgctgtgtagggaaggcaactgaagttgaatggcttatcagtttgctcaacggtgaggtcaaaatcctcattagaatgatcagcattgttgagcgtagtatttctagtgattttgagttgatgcgtttgcatgtgcatcccattttcctgtggcactaggtatttggttactggcaatcccttaattttaaaagagccagcactggctccagccatccgatcaggataagtctcaccagataagccttcatattcaaagccactagctagagttggtatgataaagcgcattccaattactggaagcggtggtaaatcttttttaccaaaataacgcatcttaattataacatgaccattattgttaatttggtaagtaatttcaacttttgtttttggaatagttaaagtttcataaataaaagtaatttcgactttacttgcgtactcatgattagaaaattggttgttgagtggagcgattggcaaatctgcaaaatcatgttgatcaactttgagctgaatttcagtacagtggctaaacatatcggcgccgagccattgagctgcttttaagttgaaaccgttgccgcgatcgttatcagtagttgcacgccaaaaggttggggtaggaacgcgataaaaccattctttacccttaatttttaaagactctaagccacctttttcatagctgaaaatatattgcttatctggggtattaatgcctaaagtagcatccccatagattatatgtaaattatttgtgtaagccatagtagtatttaacctcctgcattgctggttttggcgtacgatcggcgaacatcaagccatctcctgaaaattcatagtcggaatggcggtcatcgaaatcaccaccataacgcaacacgtcttggttgctaactggatcatgtactaatagcgcttggtcgatgaagtcccaaataaagccgcctaaatattgtgggtattggtcaagcaatttaatgtaggaacccatgccaccatcagaattacccatatcatgcatatattcgcattctaaaaatggcttttgaggcttatttttaagatattcttcaacatcttttggtggtaaatacatccagctttcaagatcagaaatcttgtcctttaattctggcgtatgaaccacgccttcatagtgggtcaggcgactatgatcttgtgctttataaaatttattcatagccgcaatgttttctccggcatatgattcattgccaagagaccagaagagaatggcggtatggtttttttaagtttcataattgttgcgggcacggtcaattacagcttcacgccattcaggaatagaaccgggaacattatctgaaggttcaacttgtcccatcttttgccaagtaccatgtgattcgagattattttcagccatgacatagattccattttgatcgcagagatagtaccacggaatctgattaggataatggcaagttctaaccgcattgatgttattttctttaaaagcatgtatatcttgtttcatatcagttaaagtgatgctgcggccacgcttcatattccattcatgccgattgaccccattaataattagacgttgaccatttaataaaacaaccttgtcagaattaatttcgatttttctaaagccgaattggtaaggaattagttcaagtaaatcaccattttcagcgtgaacttcaataattagttggtacaaatatgggtcatggttatcccaaagatgcacatttttgaataattctttttcaatttttatggttaagctgattggtgcttttttctcaagtagagttttgccattaatatcttctacgaacaagtgaactgagccagtatttttgcctgtaaagtgcaattgagcattaaagattccatcttggtaattatttgtaacttctggttttaaatcgagatcggttaaatgcgtctcaggtaggccgagcaattcaactgaacgaaaaatgccagaaaaacggaacatatcctggtcttccaagaaagaggcagtgctatgtttgaaaacttcaactgctaaaatattgtttttgtttttaatgtaaggtgttagatcaaattctgaaggagtgaaactgtcttcggcgtaaccaacaaaatgaccattgagccaaacatacattgctcgctcaactccttcaaaaacaatgtgaacatcacgacctcgcaaagtggaatttaagtcaaaatgcttaatgtaagagccaactgtgttatctgcacctttgctaaaagagtcggtagctttttggttgattgtgtaagcaggtcgacgataaatttttccttcccacggaaagagcgtattaatatattgattttgagcgtaattatttagctcaatttcacttgggactggaatgtgatcaaatgatgaagaatcgaaatctgttttaaagaaatcaacgggtcgtgtttgtggattagctgaaaacttaaaacaccagtcaccatttaaactttgaacaaaactactagtttgcttttgccattcgcgatagttcttgaaatagggatgatcgctgtgggcaggaacttgattaacgcggaaaacttcggggtcatcaagccagctaagatttgctttcatgaaaatacctgatttctataaaaaaattaaccttgaaaacgcttatattatagcatatagataataaatttacttaataagtaaattatttactgaaaaatattttgaagattaatctttttgacccgaaaacgaatgataaagtgcttatgatatttattggaattacgtaaatattttgtataataaagttaaaaattatttatttaagatagaaaagatataaatatgacaacaattaaagaaatagcacaagaatcagggtattcttcagctacggtttcgcgcttattaaataatgatcctaatttgtcaattacggctgatactaagaacaagattttagaaattgccaataaattgggctattggaaggatcatcaggagaagaagattcgtccaacaattgcgttactataccgagtaaatcatgaagaacaattgcaagatgaatactttacttcactgaagcaggcattaatttcaaccgtggaaaatgaatcattgcaaatgaagaccttttatgatgctgatgatttgatcaagcatgcgtctctttttcaaggctttattggagttggcgcagctccgattgaaaatgaaacgcttaagaagttacatgaggttctgcctaacggtgtttttgtcgatactaatccagcgcctgaattatttgattccattcgcccaaatttaacgctgacagtaaaaaatgcaattgatctttttctcgataaaggatatcagcgcattggttttataggtggcgttgggcctaagcatgatcatattcaagaagtagatgtacgtgccactgcttttgcggagtatatcaaggtgagaggcaaaagtgatgaattgatgtttgttaatggcccgtttagcgttgctaatggctataagttgggaaaagaggtactggctaaatgcaaaaataaattgcctgatgcatttttaattgcttcggatactttggcagttggagttttgcaagcttttaatgagaacaatgttaatgtgccaaaagatactgcaattttaagtattaataatagtaatgtggttaagtatgtttcaccgccactttcttcttataatattgatcaacaagagatgattgatatggcattaaatatgctaacgaatctgattattcaacctaatcgggcacacattgatgtaaatatgaatactaatttagttgtgcgcaagagttttgtgcctaagaagtaaattaattagtaaataaaaatattttttagtaatactctcaaaagagaatgctaatttaatgccaatgtcattaagttaagctattgacttttgaaaactgatctttttaggaatcgaatcatttggattcgattcttttttttgcaaaaataaaggcgaaaagacaaacgaaatttaaaagccaagtctgcagtatattacatgtatcgcgtggcctaattaaaaaagaaatacaaactacgcttatttagcatacgcaaaaaagcatcaaattggctatctaaagccaaatgatgctttaattgtttttttctccaatgtcaatagcttaacttaatgacattgaatttaatgcgttctctttttgtttagctttcagtaaataatttattaaatataaataaattctttacttaacaaaaatagagaatatactaaactatgtaaacgattacaattaatgattgctttagggggcaaatttatgacacacagtgacaagtcagggaagcagattctttcctacgcatcattctgtttgggtaacttaggtcactcggctttttatggtgtgatgagtacatattttattatttttattactagcagcatgttcagcggacttaatcagtccgttgcagataagctgatcggcttaattacaggattgatggttgtaattagaattgctgaattggtaattgaccctattctaggaaatatagttgataatactaaaactagatggggcaaattcaaaccttggattttaattggtactttagtaagtgccgccttattattagttttgtttactggcatttttggattagcacaaaaaagttggattctctttgcgattttatttgtactaatttatatcagttttgatgtattttattcattatctgatgtttcttattggggcatggtaccagctttaagtgaagattcacatgcacgtggtatttatacttctttaggtgccttttcaggaactattggttggaacggattaacaattattgttgttccattagttacagctgtgacttatgcggtaactggtaaacatgaggaaggtgcgccaggttggttagcatttgcggcagtaatttcagcgttagcaattatatgtgccttgattgtttgttttggtactaaagaaaagcacaatattattagaaactcagctaagcaaaagactactttacgtcaagtattcggtgctattttccataacgatcagattttatggccaagtttagcatacttgctttactcattagcatatgtaattaccaatggtgttttgttctatatgtataaattcgttattggtaagccaaatgacttctgggtagttggtgttattgcaacaattatcggtttctgtattagtccaatgtttccgattttgaacaaatacattccaagaaaatggttattcattgctggacaaacttgcatggttttagcttatgttttgtttattttcggcagagacaacgtatttttgatggacttgggcttggttcttttaaacattaactttgctcaattggtaactgttttaacattaactgacgcaattgaatatggacaacttaagaatggtcaaagaaatgaagctgttgttttagctgttcggccgatgattgataagttcggtttctaatgctttagttggttatgttgcaattgctgctgggatgaccggttctgcaactgctgcagacatgactgctcatgatattagcacctttaatatgatggcattatatatcccacttgctttggcagtcttatcaatcgtagtctttttgactaaggtaactttatctgaaaagaaacatgccgaagtggttgaagaattaaaagatcaacttgcagaaggtaagattgaaaagaatgaatctaatactcaagttagacctcaagatcagactatctatgctcctgcagacggtaagttaatgaagatggcagaagtaattgacgaagatggtaagccattcccaggaaagggttttgcaattaaaccagattcaggcaatatttatgctccatttgatggtgtagttaggttcacttttggtactaagcatgcttttgaaattgtttcaaataatggtttacaagtagttgttcatgtcggcttaggtacagttaacttgcgcggtgaaggttttgaaacttattatgatgatggtcaaaaggtaaaaaaaggtgacttgctgttagagtttgatcgtaatttagctcttaagaatggctatcaggacactgtagttaccttctatacacaaccaggacgaattgtaaaatctagtgaaattgaagctggtaagattgttgagcatggtgaaaaagtattagatgtacaatttaagtagaggaattacaatgacacagttaaaacgttttttatatggtggggactataacccagatcaatggccagaagatattaaagtttttaaaaaagcggatttaaattctgctacaattaatgttttttcttggagtttgcttgagtcaagagaaggccaatatgatttttcaaaattagataaaattattcaagaattgtctgatgcaaattttgatattgtacttgctacttctactgctgcgatgccagcttggatgtttaaaaaatatcctgatgtagcacgcgttgactatcaaggacgccggcacgtctttggtgcacgacataacttttgccccaatagtaagaattatcaagttttagctagtaaattagtcgagaaaattgccgaaagatatagtaataaccctcatattgctgtttggcatgtgaataatgaatatggcggcaattgctactgtgaaaattgtcaaaatgcttttcgtacttggctcaagagtaaatatcaaacactagataacctgaatgaggcctggaatatgaatgtgtggagccatactattcatgattgggatgagattgttgttcctaatgagttaggagacgcctggggaccagaaggtagcgaaaccattgttgccggtttatcaattgattatttacgttttcaatctgatagtttacaaaatctttttcagatggaaaaatcaattattaaaaagtatgatccacatactcctgtaactactaatttccatggcttacctaataagatggttgattatcaaaaatgggctaaagatcaagatattatttcttatgattcttacccaacctacgatgcacctaagtatttaccagcatttttgtatgacttaatgcgtagtttaaagcatcagccatttatgttaatggaatctgcaccgtcgcaagtcaattggcaaccatatagcccgctgaaaagaccagggcagatggcagccacggaattgcaagcagttgctcatggtgcagatacggttcagtttttccaattaaaacaagcagtaggcggctcagaaaagttccatagtgccgtaattgcccactcacaaagaaccgacacgagggtctttcatgaactagaagatttgggtaaaaaattaaaaaagattggcccaactgttttaggctctaaaactaaggctagagctgctattgtatttgattgggataacttctggtcatatgagtacgttgacggtattagtcaagattttaattatatggaatcaatcttagattattatcgccaattttatgaacgcaatattccgacagatgtaattagtgtcgatgatgattttagtcaatatgatttagtagttgctcctgttttatatatggttaaagcagggctaagcaaaaaaattaatatttatgtcaaaaatggtggcaactttgtcactacctatatgtctggaatggttaacaatagtgataatgtctatcttggtggctatcctggcccgttaaaagacgttatgggtatttgggttgaagaaagtgatgcaattgtaccaggacataagacaactgtttcactaaatggcaaggattataaagcgagtttggtttgtgacttgattcatccagaaaatgcaaaagttttagcaaagtactccaatgagttttatgcaggaacggctgcagtcacggaaaataaatatggtcaaggtaaggtctggtatgttggtactaagttggatcacattgggttgacgcagctattcaaccatattgttttgacagctaacgttgaatcattggtgggcgacagtcataagttagaagttactaagcgagttactcagtctgggcaagaattatactttgttttaaatatgagtaatgaagaaagaaaattgccacaaaaatttgtagagtatcaaaatattttaactggtcagcaagctcatgatcaaatgaaggcatgggatgtacaaatacttgttaaataaatgattttttccttaatgaagacaagaagttagacaaacgatctagcttcttgtttttttacttaaataaatattttatttatttaagtaaactatttactaaaagataatgaagagatatactaataactgaaaacgattacagaataaatttgaggtaaaaacaatgaataaggaagaattacttaaagaatatgagacaacttttggtgaaaaaggtaaggatgtctttttctcacctggtcgaatcaacgtgatcggtgaacacactgactacaatggtggtcatgttttcccagctgcaattagtttgggtgtttatggtgtttacggcccaagagaggataaaaaagtttgcttgttttctggcaatgttgatggcgatatcgtggaattcgatattgacgacacaactgttgagaaagatgatcgcttttgggctaactacttcaagggcatgattacgtacttacgtgaaaaatatgacaacattgatcatggttttaatctttatatcaaagccaatttaccatcaggttcagggctatcatcaagtgctgccattgaaatgctaatgggcatcattttaaaggatgaatttaacttagatgttgaccggattgctttagccaagatgggtcaaagaacagagaatgaatttgttggcttgaattcagggattatggatcaatttgcctgcattatgggtaaaaaagatagtgctatcttcctcgattgcaatacattagattatgagtataagccactcgctttaggcgattacgaaattattattatggcaactaacaagccacataccttagccgattctgcttataatgatcgtgttcgtgaatgtcatgatgcagtgaagaagttgcaggctaagttagatattaagactttaggtgagcttgataatgatacttttgatgaatatgcatatctgattaataatgaaactgaaattaagcgtgctcgtcatgctgttagtgaaaaccaaagaactttgcgggcaacaaaggccatgcaaaatggagatttggaaaaattgggacgtttgattgatgcttcacacgtttcacttcattacgattatgaagtaactggtcaagaactagatactttagctgaagcttcatgggctcaacctggcgtcttgggtgcaagaatgattggcggtggcttcggtggtagtgccattgcaatcgtcaagaaagaccaagctgaggcatttaagaaaaatgttggcaagatttaccgcgacaagatcggttacgatgccagcttctatgatgcggaaattgttgatggaactaagagaatttaatcagacaagaggataagtatgaaagttattgaaaaatttgcggatgaagttattaatagtggagcgtatgagccgctcgatcgcgtatatgtgattaacaaaattcgcgctttagttggcgatgaggcaagtagcgttgaagctaatgatgaacaaacttcagttaagcaattagttgatttagccgtgcaaaataaaaagatttcggatgatgttacttcacgtgaagttttgaatgatcaactatacgacttgataacgccaacaccatctaaaactaatggcatcttttggcaaaaaatgcaaaaatcacctgaaaaagcaacagattggttttataaactttgcgaaaacaacaattatgtcaaaaaggaagcaattgccaagaatgttgtattctcagggaccagctctaaaggacatggcttagaaattacaattaatttgtccaaaccggaaaaggatcctaaggcaattgcggcagcagctcatgcaactggtaagaaatatcctcaatgtgcactttgcctagaaaacgagggttaccttggtggatatggcaaaaatgctcgttcaaatttgagaattattcgcatgaatattggtggccgcccttggggatttcagtattcaccatatgcttacttcaatgaacattgtattttcttagatcaaaagcatattccaatggtcatcaaccaacaaactttgattaatttggttgaaattgaaaagacgttaccacattattttgttggttcaaatgctgacttgccaattgttggtgggtcaatgttagcacatgaacactatcaaggcggacgtcatacttttccaatgatgaaagctaagattaagaaaaatgtagtctttgatgattatcctgaagtggttgctggcattgttgattggccaatgagcgacttgcgcttgattagcgataattcgttagatttgattgaattgggcgctaaaattattaatttctgggatcattattcagattctgctcgtcaaattaaggcttttgatggtaaaacacgtcatcatactgtgactccaattatgcaccgtgaaggcaagaacttcgtacttgatctagttttgcgtgacaacaacactagtgaaaattatccgttaggtattttccacccacataaagaattgtggcatattaaaaaggaaaatattggcttgatcgaagtaatgggccgtgctattttgccaggtcggttaaagagtgaacttgaagaagttaaaaaatactggttgggccaagataataagatggctattagccacaaagaatgggccgatcaaattaaagcagagcagaatattactgccgagaatgttgacgctgtgatgcagcaagctttagttgaagtctttgaacaagtattgcaagatgccggtgttttcaagaataatgcagatggcgatgaaggctgggataagttcattaccgctttaactaggcagatttaactcatcaatgtgtaaaacgagatctgttggatctcgttttttttgttagcggtaactcatatattctgatggttaaataatttataatatttatgaaagcgaatacaaaagaagggcaagagtatgaagacaagttttagaaaatatggcagaaaagataataaagatctttgtgaaatcacactagagaatgatcacggtatggtagttaaggtattgaactatggtgctacattggaaaaggtgttgcttgatggtgagaatatgattttgtcactggataagccagaagattacgacaaggagcgtaattatctaggcggtacggttggacgtattgccggaagagtgagacgaggtttatggcggcacggcttagaattacatcaattaccaatcaatgaagggcctaaccacattcatggtggtattgggactgatactgaaatttggaattttagacctagttgtaatgaaaaaggtgctcgtgttgatttaacactttttgatccagatgggtataatgattatcctggtaatttaaaattacacgctcgttatgagttagataataacaatattctgcattattcattgggtgccatgagtgataagctgactatttttaatccggttaaccatactttcttcacattaggtgaaaagaaaatgattaatgacttgcaactgcaaatgaatgctgattattatattccagttgatgagactggcttgcctgatcgtggtatggaaaaagctgatggaacagcattcgattttagaaagaagaagcgagttggggatgcattggaagctgatgatccgcaaattaagaaccgcgatggaatggatcatccatttatcttggatggcaatatgccaaatgcagtgctaacttctgctaaacacaagttaacggtaacgactaatgcgccatctctgattctgtacactggtaatggctttgaccacactggcaagtatacagctgactttggtccgtattgcgggattacttttgaagcacaagtgccgccagcagaaggtgatgatttgggacgcatcacgcttttgccaggtgaaaaatttaagcggactgttgattggaaatttgaataaaaatatggagaacatccttactgaatgaattggtagggatgtttcgagactgtaaaatagtttgtgtaaggatgaatgattccttaaatttatttctttaaacattagaaaaaggagttcctttctcgtatgattggtttgaacaaaaaaacacatacagaaagaagaactccttcatgaatgattttaccaaagattttgctcaagctctattcaatccagacaaaataaatgatttattgcgcaaagagctacaacaggctgttaataacttgttagaagctgaattgactgcctttctgggctatgatccctatgccagaaatggctggaatactggcaactctagaaatggtgcttatttccgcaaagttgatacgcaatttggcccaattgaagtgcaagtgcctcgggatcgcaacggtcaatttcatcagcacacgctgcctggctacaagcagcactcggatatcttggaaagcatgattatcaagctttactccaagggcgtgaccaccagggaaatagccgatctaattgaaaagatgtatggcagccattacagtccagctcaggtatcaaatatttccaagcagatgattccaaaggttgaggcttaccacaaacgcaagctaagcgacaagtttttctgcgtctatttggatgcgacataccttcctttgcgccgagaaacatttgagcgtgaagcagtctatattgccattggcatcaagcctaatgggcacaaggaggtcattgactactgcattgcacctagcgagaacattgaagtctggacagatatgcttcaaaacatgaaatcccgaggcttaaagcaagttgagctttttctttctgatggtgttgttggcatgaaaacagccttggccaggacttatcctaaagctcattttcaacgctgtttggttcatgtcatgcgcaatatctgcgctaaagtacgcgtcgacgatcgtgaaaagatcatgaacgaattcaaacaggtgcatcaacagacaaacaaagaagaagccacagctgtcctgcatgacttctataccaaatggggcaaggtttacagccatgttatctgaagcttgaaagacatagaaccagatctgctggtcttttataactatcccaagcagatcagagcttcaatttattcgactaacatgattgaatcatttaacaatgtgatcaagcgcaaagctaagcctaaggcagagtttccaactgaacagtcgcttgatgcttttattggcattcaggcaatgagctacaatgaccgttatttcaatcgaattcataaaggctttggtcaggttcaggacaccttagaatcctactttgattaaataaataattaaaaaatcaatttacgagaaagatctatttacacaaaagatttgacagtttcgatgtttccttctttggatattatgatttgattttacaagtaaatccatattaatatttaaaatatttagaaatcaactgaaaggtatagtaaaaatgatgacaaacgaaaagattattgctttagtcaaggaagaatatctaaacaagattccaaaaatttttcgcaagcatgctgttgaaggcacttgcaagttaatcgctagagaacatcccgatttatacaaggcttttgaagatggtgaaccaaccgcagaagaaaaacaacaaatgacagagttgattaacgggattttcgaacagagaatgaaaaagcataagatgttataaaaagacgctggaatgtaatgattattagatcgctacattctagcgtttttttgattttaattttgatttattaaactaacaggtagcgtataaacactttctaatgaaacagagggatcattaatttgacgtaaaagtaaatcgcacattaattcagcaatttcttttgtatgttgccgagcactaattaaatttggaaaaagactttgaatcaaatgactaccatcaaatcctgtgattaaaggtacttttcctaaataatcagcacattctttagctagtaaagctgtaatgtcatcggtacaacaaattgcatcatattcgtcatcctttaaaaattgaaggatggctatttttttagcaataattgagtcactggcactgagtgagcgaagatcgaatttagaatcaaaagtgttaaatacgcgaatcattcctttgattcgatcacttattgggtaatagtcttctttagcaccagcaataataataattttctttttcttttgttttagaacagattgtgcgatttgcatacctgcgtcatagttattagattgaacagttggtatttgaggactaagtttacggtcaaagctaacaataggaaactttatttttagtccttttttaggaatcttaataggagagctggtgatcagtccagcgatttccttttgtttaaatcgctctaaatagtaattaatatcttgggattgatagtgatctagatgaagaatacaatcgtatcctttttcctgtaaataaaaggctagatattcaaataattcagaataaaaaggattattaatttttggaaaatcaacctcaattaaatttaatttagatgtagtattgactgtattttttgttttgtagcctaatttttttattgcttctttaaccttaagagcagattcaatacctacatatccattttgattaatatatcttgaaactgttgctatcgaaacgtttgcttctttagctatatctttaatagtaactaccatattttttcacttccttatgtaaatattacacatttaaaatcctatatcatagtattttgatttatttaaatgtgtaaatttgtgtaaatccattgaaaactgtaaatagaagtgtatgatgtaattgtaaatatgatagcgcttacttaaagagagcgatatttgatcaagaggagtgaagatttatgaaaaagtggctaaaaagaatagctttaattagcttagtcgctacgatggctttaagtttgacagcttgtggtcaaaataaaagcagcaattctggtaaaaaagtgacaattgagtactttaaccagaaaaaagaaatgtcagcaactttgaaagaaattatcaaagactttgaaaagaaaaatcctgatattcatgtcaaagaagttgacgttcctaatgcaggtacggttttgaagacaagaatgctttcaggagatgttcctgatgtaattaatatttacctacaaaatattgattttcaggaatgggcaaaagcagggaaactgtcaaatcttttgtgtaaatagttctttctcgcaaattgattttttaattatttattcaaaataagattctaaggtatcctgaacctgaccaaagcctttatgaattcggttgaaatagcggtcattgtagctcattgcctggatgccaataaatgcatcaagcgactgttcagttggaaattctgccttaggcttagctttacgcttgatgacgttgttaaaggattcaatcatattggttgaataaattgaagctctgatttgtttgggataattgtagaagaccagcagatcgggctcaatttccttcaaacctttgatgacattgctataagctttattccatctggcatagaatttgtgcaagacagctgcagcttcttttttgcttgtctgttgatgtatctgcttgaattcgttcatgatcttttcgcggtcatccacccggactttagcacagatattgcgcatgacatgaaccaagcagcgttgaaaatgagctttaggataagtcctggccaaggctgttttcatgccaacaacaccatcagaaagaaaaagctcaacttgctttaagcctcgggatttcatgttttgaagcatatctgtccagacttcaatgttctcgctaggtgcaatgcagtagtcaatgacctccttgtgcccattaggcttgatgccaatggcaatatagactgcttcacgctcaaacgtttctcggcgcaaaggaaggtatgtcgcatccaaatagacacagaaaaacttgtcgcttagcttgcgcttgtgataagcctcaaccttggggagcatctgcttggaaatatttgatacttgagctggactataatgactgccatacattttctcaatcaagtcagcgatttctctggtagttacgcctttggagtagagcttgataatcgtgctttccaaaacatcagagtgctgcttgtagtcaggcagcgtgtgctgatgaaactgaccgttgcggtctcgaggcacttgcacttcaattggtccaaactgggtatcaaccttgcggaaataagcaccatttctagaattgccagtattccagccatttctggcatagggatcatagcctagaaaggcagtcaactcagcttctagcaagttattaacagcctgttgtagctctttgcgcaataaatcatttattttgtctggattgaatagagcttgagcaaaatctttggtaaaatcattcatgaaggagttcttctttctgtatgtgtttttttgttcaaaccaatcatacgagaaaggaactcctttttctaatgtttaaagaaataaatttaaggaatcattcatccttacacaaactattttacagtctcaaagcaggttattttgaagatatgactcatgcttcatatattaaaaacattaaaaatcactatgctgattcttttaaaattaacggtaagatttacaacgcaccacttagtgccaacgtttacggtttcttctataatgcaactgaatttaagagattaggaattaaagctcctaagacttgggccgaatttgaacaaattgttaaaaaaatcaaggctagtggcaaggcaccatttgctgtagctggtactgagccttggactttaaacggatatcaccagttatctttagctactgttacaggtggtgctaagcaagctaaccaattacttaggttctcagcgcctaacggcattaaagtaaacaatccttatgttcaaaaagattttactagattgaacttacttcgtgaaaatacacaacaaaattggcgtggtgctagttacaagaaactgtcaaatcttttgtgtaaatagttctttctcgtaaattgattttttaattatttatttaatcaaagtaggattctaaggtgtcctgaacctgaccaaagcctttatgaattcgattgaaataacggtcattgtagctcattgcctgaatgccaataaaagcatcaagcgactgttcagttggaaactctgccttaggcttagctttgcgcttgatcacattgttaaatgattcaatcatgttagtcgaataaattgaagctctgatctgcttgggatagttataaaagaccagcagatctggttctatgtctttcaagcttctgataacatggctgtaaaccttgccccatttggtatagaagtcatgcaggacagctgtggcttcttctttgtttgtctgttgatgcacctgtttgaattcgttcatgatcttttcacgatcgtcgacgcgtactttagcgcagatattgcgcatgacatgaaccaaacagcgttgaaaatgagctttaggataagtcctggccaaggctgttttcatgccaacaacaccatcagaaagaaaaagctcaacttgctttaagcctcgggatttcatgttttgaagcatatctgtccagacttcaatgttctcgctaggtgcaatgcagtagtcaatgacctccttgtgcccattaggcttgatgccaatggcaatatagactgcttcacgctcaaatgtttctcggcgcaaaggaaggtatgtcgcatccaaatagacgcagaaaaacttgtcgcttagcttgcgtttgtggtaagcctcaacctttggaatcatctgcttggaaatatttgatacctgagctggactgtaatggctgccatacaccttttcaattagatcggctatttccctggtggtcacgcccttggagtaaagcttgataatcatgctttccaagatatccgagtgctgcttgtagccaggcagcgtgtgctgatgaaattgaccgttgcgatcccggggcacttgcacttcaattgggccaaattgcgtatcaactttgcggaaataagcaccatttctagagttgccagtattccagccatttctggcatagggatcatagcccagaaaggcggtcaattcagcttctaacaagttattaacagcctgttgtagctctttgcgcaataaatcatttattttgtctggattgaatagagcttgagcaaaatctttggtaaaatcattcatgaaggagttcttctttctgtatgtgtttttttgttcaaaccaatcatacgagaaaggaacccctttttctaatgtttaaagaaataaatttaaggaatcattcatccttacacaaactattttacagtctccaactttagataaattacttgatcaaatgatgacgcaatttgagcagttaaataaaaattatgaaaaaggacatggagaacgtctctatgaacatttacgtggtcgggtaaaaagtgaagccagtatggaaggcaagtgcaaaagaaaagatttaccgttaacgccacaatcagctttgcgtgctaatcgagatagtgttggattgcgtgttgtctgcaattttattgacgatatttatacctgtattgactttattaagcagtgggataatgttaatgtttatcaggaaaaagattatattactaatgctaaaactaatgggtatcgttcatatcatatgatttttgacgtgactgtacctgatgaagatgttgacggcaatataccgggtcattattttgttgaagtgcagctaagaactatcgccatggatacttgggcaagtctagaacatgaaatgaaatacaagcacaagattaagaatcctgagatgattggcgaagaattaaaaagagtagcagatgaattagcttcttgtgatgtatcaatgcagacgattcgacaattaattagggaagaggattagtaaattaatgaaaattttagtagcagaagatgaaccacagctattgcgtgttttaaccgttgccatggaacatgctggttatgatgttgatccagtggacaatggactaaaggcagtagaacatgctaaagaaaattcttatgacgtaattatgttagatatcatgatgccagtcatggatggaattactgctttgaaaaagatccgtgagagtggcgacaagacttatattttaatgttgaccgctaaggccgaggttgatgaccgagtaactgggcttgatagtggtgctgatgattatttgactaagccgttttcacttaaggaattgctagcacggctgcgttcaaaagaacgtcgagaagatgattttacacctaataaattggaattaggggatgtaactttaaatgtatctaagcaagagttagttagtcataactcaattcgtttgagcggaactgagactcagttgatgaattattttttattaaatcaaaataaggaattatcaacggaagaattgcttaatcatgtttggaaaaatgatattgatgcaaacgctgatgtagtttggatttatatttcatacttgcgacaaaaactgcaatcaattcaaagttcagttcgaattgaaggcgataagggtgactcgtataagttagttaagtaggtgagcagatgattcaaaaatttcgttggaagtttattggtacttctgttgctgccttatttgtagtcctattgttgaccttaggcggcttagtttgggtgactcatgttcaaagtcaaaatgaagtagatcgggtgctgacagctttagttaaaaatgaaggacgtttatcacctaaaaatgccaagccagcttttggtgaccaacgcgatccaattaatcgcaattttttaggtgggcaatataatcctgaagcggtttatcagtatcgctattttgcagtaatgattgatgaaagtcatcgcgtacatgtgatcaacgataataatgtttacaaggttaataattctaagattcagaatattaccagagcagctttagaaaatggagacaaaagcggtgtagtcgccctagggcaaaatcaatatgccttcagagttgctaaaaattctactggtgaaacgatgattgtctttttaaatgagaccctaatttttaatcgtttttggttattattcagggtagctttagttttaggattaggagctttgattgtcttcgctttagttttgattttagttttaggtaaagcaatcaagcctactgttgatgcttatcataagcagcaggagtttattactaatgctggtcatgaattaaaaacaccattaagcgaatacagaaatggaagagatgcttggcaataattctgaatggaatgaaagcaataaagagcaagtagcaaaattaaccaaattaattaatcgtttgatttcgttagctcgtaccggcgagatgggtgaacttaccttaagtaaaattgatttttcaaaaattgttgaagaaacgactaaagattttaaatcagtcatgaagaagaatgacttagtttatcaagtatcggtgcgtgaagggctgaatgttttagctgaaaaacatactttagctgagatagttaacatcctattggacaatgcccagaaatattgtgatcctcatggcaagattcaggtaaaattgactaaaggtggtaccttaagtaaatatgcagttttgcgggtagaaaatacttatcgtgaaggtaaaggcaaagactatagtcatttctttgatcgcttttatcgtgatgataagtcacataattctaagaaaggtggctttggcattggtctagccatggcacaagaattagtggaagcttttcatggtaaaatttcggcccaccataaaggtgaagacattgtttttactgttagtttaaaaattgctaaatgattattctgtgatagttgtataattagaacagaattgggggatcattttggcgaagagaaaatcaatttataccaaagatgttgtcctggttatggcagcatctttcttttttatgtttagtacaatgtttgttaatcctttgattaatggatatgctaaagaattaggcgctagcagtgcttttgctggaatcattgtcgggattatgagtttagcagcaatgtttttgcgaccggtagctggcaatttaaccgataaattttctaaataccgcttatcgtttattggcggcgctttaatttttgtaggagtaatgggctacgttttgactccgtcaagtggttggcttttgctctttaggttaattaacggcaccggttatgtcctgtgcacagtttgtatgactacctggcttgcttttttagtgccgcgccaacatgttggtgaagcaatgggcttttatggtttaatgaatgctttggcaatggcgttagctccagcagtttcgattaatatttatcaaaaaataggttatcgaacaagtttggtggcatcagctgtttcagctttactaatgattgtagcaattcagtttgtgggtgataatgctttgcctaaaaagcgcgtccgaacgcagaaaaagagtttcaaaattattcaatttaatgtcctaccggtggcaattttgacaactttatttgctatcccgtattttgtaacacaggcagatattgtaacttatgtagaacaaaaacatctgactgtcgcagttggatcatatttcttgatctatgcggttgttttgttgattattagagtaggactaaaaaggtattttgatacagtacgttttggcgtctggttttggctaagtctagtttcaacggctacttatattatcttgctcgcaataatgaataatgattggcaaatggctttagcggcagctttaatggcgtcaggctatgggatcatttattcagttttgcaatcaactgcgctgttgttagcaccgattgaagaacaaggcttagctagtgctactttttatttaggattagatattgctatggcctttggcccgatgatcagtggtgtaattgattctgctttaccgatagaatggttctatccagtagaattagtcttagttccattgattttagtagtttatttcatttggcgtaagcgtttgaatggcgcaattgaccatcattagagggaaaatatgagcgaatatgtagttaaatctaagttagaagataaagaatggcaaattgccaaccaagtacgtgatcatgtttttgtttgtgatgatgttaaacatgatgcaggtcccaacccagttgagtatctatgtggtagtgttaattcatgtattgtgatgtcggcagggatgattactaaagcacatcaacttgatgttaaaaattttagggtagaaaatcaggcacaaacggagaatctgggccatggtaaatcagtagtaactgagatgaagatcaaggtcttctttgattcgacaatgactagagccgagaaggaagaatttttagctcacactttgcatgtttcaactgtttatcaaactattaaagcagctgtcaaaatttatgtggaattaggagaataagcgatgagcgagccatattacaaacaagaataccagggtgaaagaaagttagatggtgaggccccagtttttagttttgatcaaattatgaaaaaaacttttctgcgaccatttatctggaatgcaagaactaccagaagaagtttctggattggaatcgttattactgaagttataatttggattggtggaattattacatttttggcaactgttatgccagtttctcactatgagaatgattcagctgatatgataaatggttttgcttttaatggtgatcacgcttcgatgattgtcattatcggcatgatcatttggggcttgatctatctttatttgaaattatgccaattaggcctagccgtaagaagattgcatgatatcaattatacaggttggcggattctgttaatgctgataccgttaggttggatttttgttctgtattttgcaattcagccaagtaaacaagagccggtgaaatggggaacgtatctttaccttgacgaataataaaaaaatgttataattgaactataagagattacgttaggagattatttcgatgaaaactaagaatttatttacttcattagctgccgcagtgatgctttcagctggtttagctggtgcaggtgtgtctgctgcagaaccagttcatgcagcaactacacaaacttcaagcaaaaaaggtaccattagtattaagcgtagatcagtatcagctacagttaataatgctaatcctaagctttacgctgtaaaccaagatggtaaaatcgtaaagtcaatggattcaaattatactaaaggtcaaaccatccagctttacttctctaacgaggctaagaacgatcaaggttctgttactttctattatgttgacagtcaaactgtagatggacaacaatgtgcaatttatgttgtttcgactgatgttaccccttcagcaacagttccaagtcaagcagactggtacaagcaagcacaaagtgaccaaaaagccattcaagatgcttacaataatagagcattaaagtacatcgttgtttcacctaagtcaaaaaagggtgcaaagatctactacgcatataagaagagtgctaaggctaaaaaggtttactttaaggcaaccaagaagaagatcaagtacggtaagaagtacaagtcatcgatgatcgttaaaaacggtaagagcagatatgcttatattggtaagaagagatacttaaagacctctactattaaagtagtaagtgctaagtacgcaccagttcaattatcagatgatttgaagaacttaattgttcaaaactagaaaaagttaataaaaattgtagcgtaaaggatgaattattgtcctttacgcttttttgatctaaaaattaataataatattgataaaaaatctcactgacctacaatagactttgcgttatttttagggagttgtaaaaataagaatgaagagagtaaaagtctatttaggattagcttgtttgatgacgttattatgtttgaagccgcaagtggtttgggctcgagaactaaatccatttcagactaagatgattaatccgcatacgtcttatagaatttatcaaaacttaactcgtaaaggtccgtcaagaagtctatgccttgctaatacgtttaaacatggcaatgttcaagccagtgcagttagaaaagttcgcggcaataagtattgctatgtttggttagacggacatagaggcggttgggtcaatcagcgagcttttttaagaagaaaaattgcagttgtacatcagattagtttagtgaagaattcgcattatagttttccaactagggatgcgattaattatgcaacagatgcagcaggaacggtaattgagccaagtaaagttaaagtatctcgagcagaagtttcatcaagtaaaaaggaaagctatcgggtaagttattcttatggtaaagctcatgctcagacagttgttcaagtgagagctaatgctagagagggcattgttaaagcaaccaaaaaaaccacaagctggagacagtgctcgtagctggttcaagcactataagacgtctggtaattggggtagaagctttgctccggaaactagaccgcatgttttgaaaagtggacattttagactgaaaacctatttctatcaacctgcgactttatgtcaaagtgattcggtaactggaacggtgggaccagtaccagaagggcttactgtatcaaatggttcaatgtatgccacaatgtatcattcacctaatgatacgcgtgctcacattgtttcttacaaatttaatcaagtgcctaatcgctatactatgcaaaagttgccatggctaccttggtcacaatttctgcggcttgtatcccatgttaagacaagcccatatattaaattgggacatggacaagcaatcggttcaactcgaaagtatatttatgtgattgctaataaccatttattgcgcaagagctctcaatcagaagaaattatgcagattagtaaaaacaatttgcaaattaaacagatttggacttttaaagtttggaatcattcagctagaacaggtcgttatttccataatgctacttttgtaaatgatcaccaatttattgccgtttaccgtgatgccacagaccaccgttttgaatattgggaagttactcgtcagggtaatagttggtatcctaaagagattggcgctactagaggagattttatgcgcaatgattctcccgttcaaggaattacctatgacaagcataaaaaacagatttatttggcctttaatgattatttgtttaaattgaaacgctcaggtaaagtgctggctagaggtcactttcatacagggcgtgaatttgaggggattagcataaatggtcgtcatttatacgcagagctggcgcaaaggccagaattgttgaggcagaggataagataataggtgtaaaaatatgttatacccagataaattctatttaacacaagatttaaatagaagatttgccagaactaaccttgctcgactaatatttagtgatttgcattttgagaaaacaaatatttctttaattcaaacacaattagttgctgatgggttaaatatagagagggcttccgagaaagataaggaaagaattattcgattaaaacgagcatggcaatatattattaatgaaaataaggtgttatctttagatattgaactaaagatacatttattactgacaggctatggcttccgagataatctaaactacaaacaagaagaaaaatttttcgatgagttaatgaacaacgatacctcgactacagataaggcaatgacattgatgtatcataatatgcgtaatcaattattctggggcggaaataagcgtactgccacactagctgcaaataaattaatgattgaccatggagcaggtttaattaatgccccacttgataagtgggatagatggaacaagctgattagtcaatattatttaaccggcaaaatgaatatgttaaaagattggacctatgaaaatggcattcaaggagtagtgctgaataataattcagatttacctaaacctgatattaatccagaagattatgattaattacttaagcagaccgaataggcctgctttttttgtgtgcaaaagctctttttgaaaatatcatgataaaagttcataatagaaattgtttgtttatgttaaaggagttgttttattttttatgaagaataatgatcacgttaagataagtcctagtagtcttgtcttgatgattttttcttctatttttggatttagtaattcactgacagctttttatcaaatgggttattcaagtatcatttggtatattgtcacagctattttattcttcctgccatcagccttaattttcgctgaatatggtgcttcctttaaaggaattaaaggtggaatcttttcatggcttgaaggatctactaatgaaaaagtatcatttatcggaacttttatttggctggcagcttgggtaatttggttagtttcatcaacccaatttttcttagtttcagtttcaacggcaatttttggtcatgatactaccccaagctggcatttagggtcgctgacttcaactcagttattaggtgtgttggaagttattttcttagtaattgttacattttgtgccgcaaagggaattgataaaataaaggcgattaataatattggtgggatctttactttaggaattgccattggttttacagcagtttcactttttgtctttattttgaatcatgggcaattagctgaaccagtgaccgcacaaaatatggttcattcacctaatccagcatttcagtcaccgattgcggttatttcatttattgtctatgctttatttgcctatggtggtctggaaacaacctcaggagtaattgattcagttgataaaccggaaaagaattatcctaaggctctgattacggccatggtcttaatgacagcactttatgttgtaaacatctttatgtgtggggtggctgttaattggaacaaatcgttaggtggtaaaggtgttgacttagctaatgtcgaatatgttttgattaataatttaggtattgtcactggtcatagcctaggtctatcacattctacttcactggcaattggaactgtcttttctcgtttggccggaattgcggatgtgttatcaggaattgccgctgcctttttgatggtttattcaccgattaaatcatttattgaggggtgtgatccgcgactattgcctaagaaaatggttaagttaaataagcacaatatgcctgaattctcgatgtgggtacaagcaattgtggttagcgttattatcttatttatttcatttggtggtaatggagcacaacaattctatacaattttaatggatatgatgaatgtttcttcatcagcaccatatttatttttaattgctgcttacccattttttaaagctaaaaaagacttagatcggccatttgtttttattgaaggtaagaaaaaagtttgggcaacgacaattgttgtttggttagtggttgcggtcggaattatctttacttgtatagaaccactctttaccggagactggcaaacttcattctggacggctattggtccagtggcctttggtgttattgcttggatttattacgcatataatgaacgaaaagaaaaagcaatggcttaatacgcaaaataagacgaaggattttgtccttcgtcttatttcttttctctattttttactttaagccagctactctgacaacatcacgttcaatcattaattcctcattagttggaataaccataccaacaatagttgagtcgggcttggtaataatggtggcattttctttattagcggctgaatcaggcttaaggcctaaaagttcgagtgaatccatgacatgttcacggacaccaaagtcgtgttcaccgacaccagctgtaaaggcgataccatctaggccacgcatttcaagggtataagcaccaacatagcgaatgattcgattaatgaaaatgtttctagctaagtcagcacgcttcttcttttccccttcgagcttagtcatgtcaccacgtaaatcacgcatatctggtgaaatgcctgaaattcctaacaaaccagattcgttgtttagaaccttaagcatttgatcagcatcaagattttcctttttcatgacaaaagcaagtaaagaaggatcaacatcacctgaacgggaactcatcgtaatacccgccattggtgaaaagcccattgaagtatcgaatgatttaccatctttcacagcggtaactgaagcaccagatcctaagtgacaaacgattaatttcaagtcctttaagtcgcgtttcataatttcagcggctttttgactaacatatctaaccgaagtgccatgtgcgccatattttcttgcaccgtatttttcatagtatttatatggaagtgagtacaagtagtgcactggatccaaggtttggtggaatgaagtatcaaagacagcgacttcagggacgccaggcaatactttcatgaaggtattaatgacatcggcttcagcggtattatgaagcggcgcatattgtttcaaatcataaatcttttgtagtgacttttcatcaattaaggtggagtccttaaattcttcaccacccgcaacaattcgatgtccgattccgatgatttctttaggatcgtcaattaaatcatacttttttaaattttcaagcaagattgtaacggcagtttcggaatcaggaatgtcaactttttcttggtgtttttcacctttaaccttgattgtaaaggtggagccgttaagcccaactcgatcagccatcccttcgctgataactttttcatcaggaaaggtgaaaagcttaaatttaaaagaagagctacccgaattaatcgctaaaatttttttcataaattatgcctctttttcttaatttttgcagtgcaacctatccagtaagggcagtaagtgtcaatgtttttgcggtagcctttaaaccattagtctaaccttaatttcttaaatatttatatgacttaaatttctgcttagcttgcttaaataactattgccagctacctgtgcggttaatgcgccatgctggatgcctaaatgaacttcatgacgcttctttaagctgtcacgggccgctgcttttaattcctgttcagtcaatacagttatttctgaatcttcaaactcgctgctaagccaaaattccagctctcgattcttgatgcagcttaagatcctaagcatgccttctgctccagattttgaccatttcttgccttgccccttaacacggtaggtatacttgcggtggttgctctcgcagcagccaatggctttagtcacagtcagttttcgtttcttaaacggcttaatatcgtcccaatgacgatcaatataattccttaggcgccccagataatcatgattgagctcggtattcaattcatcaattagtcggctttctgcagtggttaggatagttttaactttgtcatagctgtatttgtattccaaagcagaaatcagcttgccttgcaggtcaggcgcaaaatatagcctttctttgattttcttatttaggtgaaagacatccaagaaatgctcatgacgcttgcatagccctacaatgtcatcgaagtctgttttggcatatccagcaccgccatcggcgttgctaagaattacagtatcagaaagatcataagtattggccaggtactccttggcttcgttcagcgcatcaagtcggcttaaagaaacaaattccttggcattgattcgctttctgcgtttcttgcttatattgacaatgccttcacagacctgatagcgatgaaattccaaccggcttttagtgcctttgatcaccacgccatcgccttcaagatacaaaactgggacctttttcttagtgcctgcggcatcatatcttgaatctgcttcttggcccgctttaatatttttcccggccatttttaccaaattgcccacctgcatatggctaatattaaagccagacaggcaattgactgctagagcagtattgcgataagtggcaacgctgcttacttctaagatgtttttgactgctaaaatactgtagcgcttgtatttgtcaaagcccattaattcatccaagggataccttgcttgtttgcctgggcagacatatcttcttctgacatacctaacttcgccaaaagccatattgattgagcgctcattcttcttatcaatctgatagccctgtgctttaaccttggtaatcatttcatcatcaactttagctaaagccaaggccatgatttccttaatcaggtttaagaagaaacagattatttttctttcacgcttaatataattatcttcagactttataatatttgcgatttcagttacaattgaattcataaaagaccagcttctaatgtgttttttgttcttaacatcagactactggtctttttgtttgagctcaagtccaaattcaaaggacttgggcttttttaattatttattcaacttaccgtaaaaaattatacacttaggtaagggcatgcaataaagaaaatgccactaatctgctttaagtaagttcttgcagtaatagtgtcaacgtctttattatacaacttttgctgtaagctcttacagatatgaaactgtcaaatcttttgtgtaaatagatctttctcgtaaattgattttttaattatttatttaatcaaagtaggattctaaggtgtcctgaacctgaccaaagcctttatgaattcgattgaaataacggtcattgtagctcattgcctgaatgccaataaaagcatcaagcgactgttcagttggaaactctgccttaggcttagctttgcgcttgatcacattgttaaatgattcaatcatgttagtcgaataaattgaagctctgatctgcttgggatagttataaaagaccagcagatctggttctatgtctttcaagcttctgataacatggctgtaaaccttgccccatttggtatagaagtcatgcaggacagctgtggcttcttctttgtttgtctgttgatgcacctgtttgaattcgttcatgatcttttcacgatcgtcgacgcgtactttagcgcagatattgcgcatgacatgaaccaaacagcgttgaaaatgagctttaggataagtcctggccaaggctgttttcatgccaacaacaccatcagaaagaaaaagctcaacttgctttaagcctcgggatttcatgttttgaagcatatctgtccagacttcaatgttctcgctaggtgcaatgcagtagtcaatgacctccttgtgcccattaggcttgatgccaatggcaatatagactgcttcacgctcaaatgtttctcggcgcaaaggaaggtatgtcgcatccaaatagacgcagaaaaacttgtcgcttagcttgcgtttgtggtaagcctcaacctttggaatcatctgcttggaaatatttgatacctgagctggactgtaatggctgccatacatcttttcaattagatcggctatttccctggtggtcacgcccttggagtaaagcttgataatcatgctttccaagatatccgagtgctgcttgtagccaggcagcgtgtgctgatgaaattgaccgttgcgatcccgaggcacttgcacttcaattgggccaaattgcgtatcaactttgcggaaataagcaccatttctagagttgccagtattccagccatttctggcatagggatcatagcccagaaaggcagtcaattcagcttctaacaagttattaacagcctgttgtagctctttgcgcaataaatcatttattttgtctggattgaatagagcttgagcaaaatctttggtaaaatcattcatgaaggagttcttctttctgtatgtgtttttttgttcaaaccaatcatacgagaaaggaactcctttttctaatgtttaaagaaataaatttaaggaatcattcatccttacacaaactattttacagtctcacagatatttttttattactaaaatttatatataaatttgattgatcatatataaatttagaatatcaatttgcaacaaaaccgcttacaaactataatgaaattaacatacaatatatattgagaggagaaaaacgaatgacccactactacgaaggctttccacaaagtgaccgcgatgaaaaaatcaagatggtgaatgtggatgaacttgaagaacgtgttaagaaggtaatgccagaaggtgcatattattatattgcttcgggtgcagaaaatgaatggacctggcgtaacaatactgctgcttttaatcattttcaaattgtacctcgtgctttgactgagatggctgatccgcaaactgatactgattttatggggatgcacttaaagacgccaattatgatcgctccaattgcttgtcatggaattgcacataaagatgcggaagtcgcaacgcaaaagggtgctgctatggctggtgcgctctttagttctagtacttatgctaataagagtgtagaagaaattgcagctgcagctccagaagcaccaaggtttttccaactttatttgagtaaagactggaattttaatcagatggtttttgatgcaattaaaaaagctggttatcaaggcattttcttaaccgttgatgctttggtatcaggttatcgtgaagcaaacttgcggactaactttacttatcctgtaccattggacttctttaagcgttaccttggtgcaaaaggtaaaggtcaaagcgtagctcaaatgtacgcttcttctgcgcaaaagattggtcctgaagatgttaaaagaattaagaaagaatcaggtttgccagtctttgttaaaggtgttatgtgtgctgaagatgcctataaagcaattggagccggtgctgatggaatttacgtaactaatcatggtggtcgtgaagttgatggtgctcctgctaccattgatgttttgccagaaattgcgcaagcagtaaatcatcgggtgccaattatctttgattcaggtgtccgtcgtggctctcatatctttaaagctttggctttgggtgctgacattgttggaatcggttgcccatatctttatggtttagccttaggtggtgcgcatggagttgcttcagttattgaacaattaaatgatgaattaaagattgatatgcaattaacgggatgcaagacaattgatgatgttaagcatgctaaattgacgcacattgcttatactgctgataatttgccatctaatactgatccaagcagacgcaaggaatatccggtaactgacgaaaatcaagttaagcaaactgatgcggtatctggtgcttctaagttagaaggaaagccagctccggaaccagagactgataccacaactggtgcttcagtaagataaagcaaaaatataattaatattttcaatatgattgtcattgaataaatgatagtcatatttttttactatcaagaactcagcggctacaatcaaggtgaaagcgattcgatttttggagaggaaaattaaattattgaagagaataatgttttgactgatactgaagagcttaaaatcttgagtgatcttgttgcaataaaatccgttaatgataatgaaattttagtagcaaaatatttacaaaaactattaggagaacatggaattagttcacgtttgttggaatattccacaactcgcgcagatttatttgctgaaatcggaacaggccatcccattttagcaatttgtggtcacatggatgttgtttcaccaggtgaattagatcaatggcatactgatccctttaaattaaccaataaggatggtaaattgtacggccgcggagcgactgatatgaagtctggtttagctgccttggttattgccatgattaatattcatgaacaccatttaattaagcatggtagtatcaggctgctagctacttttggttggtgaaccttctggctacagtattgccattgctcataagggttcgatggatactaagttaacttcccaaggcaaggaagctcatagctcaatgcctgaaaagggttataatgcgatcgatccattaatggatttattagttaaggccaacaaggcttttagagaaacagataaaaacaatccagacttaggtaagttgacgttcaatactactgtttttactggcggggaacaggtcaacatgattcccggagaggctaccgcgcaaattaatgtgcggactattcctgagttcaataatagtttggttgaaaagaaattaactgaattagttaaggcagaaaatgcgcaaggagctaaaatcaaaatgtacatctatatgtcggaaccttcaattaaaactgacggtaagtctgaatttgtaaaattagcccaaaaaattggagcaaaatatgcggaaaagccgattccaacagttgctattaaaccagtaactgatgcttcgaatttgattgccgacaaaggacctagctatccgtttgccatgtttggtcccggtaatgacacgccgcaccaagttaacgaatatgttgatgaaaagatgtatttgaactttgtgaagatctatactgaattgtttgtggcctatttgaataaataatttggaaagtaataaagagcctaggcaaaattttagcctagacttttttattgtattttgaagtattctttagccgcatcactcatccgttcaggggtccaaacaggataccagacaaattctacatcaacatttttaacttcagggacttttttaacggctgttgtaatctgcttgatcaaataatcagtcaaaggacaggcaggtgtagttaatgtcatattgatgagacagatcccatcttgatcgaggtcaatttcataaatcagccccaagttgaccacatcgacgtttaattctgggtcaataacttgagctaaatgttcaataatatcgtttttaattgttttgctatcacgcattgtgttacctacgcatctttaccaaaaatttttgctttaattgcttgacctgttggtgtaccagctaaaccgccgattccagtttcacgcagagatgccggcatttgatgaccaactttcttcattgcttcaatacattcatcagctgggattacacttgtacatcccgctagcgccatatcagctgcgataagtgcattaccagcgccaataccatttcttttgacgcagggaacttcaaccaaaccggcaatcggatcacagactaacccaagcaagttagacatcgcaatcgataaagcttgggcactttgttcagcactgccaccagctacttcaactgccgcggcagcacccatggctgaggcactaccgacttctgcttgacagccgccagttgcccccgcaatttcggcattattggcaatcaccatgccaaaaccgccagcagtaaaaagaaagcgaatcatttgctcttcgctgagctgtaatcttttttctaataaaaatagaacgccaggtaaagtgccggaagaaccagccgtcggggtagcgcagacaacgcccatcgctgcattgacttcgttagtggctatggcattttcaactgctgccatcattgtatcgcctgaaagtgtgtgtcctttctcgcgatattttttcagcttaattgcttcgccaccagttaagccagtttttgaaaagacaccgtttccagattcacctcttttaacggcagctcgcatagtttgcaagttatatttcatgcgctgccagactttttctcgtggcaagcctgatagttgacattcttgttcaataattaattcagaaataggtttgtgcgttttttctgctgcagcaacaatttccttaatatggttatacataatattgccctatgttataaacaaataatattctcaaattttttatttagttcttgcaataaatcaggatgaagataattttctacatcatattcataaatattatagtttttagtatgaaaaattcgtttgcgactaaagggtgctttttcgtgtaagagcgcggtaagctcttgttcaatgcgaatatttttgtgtggatcaactaaaataataataggtaatgcaccagcaggttgaatctcggtattatgtaagacaattttgcgaatttcaattgcaccaccaccgatagagcatccagccaattccactttctttttatcattagacatatttaaaatagcagtattagggtgaccaattgggctaggaccatcttcttcaacaaaacgtaaatctacgccgcgctggcgtgcaatctcaggtgcctttggtacgcgtagatcgtctgagtcaaagcctaaaatacctgccgcaatagcatagtctgttccatgaccacggtgagtttgggcgaaagagtcgtaataatgaacggtaactttactcggggtaccgccaaaaagtttgtaaccagcgcgtccaatagcgacggctccggccgtatgtgaacttgatggtcccaccattacggggccaataatgtcaaaaacacttttataccgattagtcattttaatccctgctttgtaagttattctgtttttaattataacgaataataaagaagattaagaaagttttttgcaattttaaccgaagttttgtcataataatatgaaaagtgaaagaggttggttaaatgactaaagaaaaagcagaattaaaacaaaatttggagcatctagctgagcaaaagggcagccagcaggcagtttcttatcaagacttgtttacaccacaattgatgcaaaagtatactagttttgctactattgacttttttgtcagagaattgggcgtgaaagactttacgcaaattgagcagatggcgatagatcaagtcgatgaatttgttaaaaaagagaccaagtttgctagctgggaagaaatgcaacaaaaggcggttagcgagtacatgatgaagttattttagcaacaaaaagcgagttagtattaactttaaaactaactcgctcttttatttactatgttaggtgaatgacttgagcacctaattcatcaataaagcgctgatcatgttcaattactagcatagtaggatgatattttttaattaattgaataatttgttcttggttaaagacatctaaatagttcaaaggctcatcccaaagatacaaatttgctggttcaagtaaggacttggctaagtagatctttttttgttggcctgaagacatttgattaattgaattagtgaatatatcacgttcagtacctaatttgtgtaagatattgagaaaatcggcatagttaaggtggtgcttttgggcaaaatcttttaatgataggttattagattgttcaatctgtgataaataggagattgaaatcttatcagctgaatgcaatttgccagtaattgttccagcaaaagtattagtaattgccttaaacaaactagattttcctataccgtttttaccagtaatcacaatttggtgaccacgcattaaatcaaaggtagtaggttggaaaaggggaagcttgtcataagcaaggctaactcctttagcagtaattagatgtttatgatggtcggggacaaaattcatagctaggtcattgtctgcttcaatattttttaaaagaccttttctttcttcgatatttttatctaatcttgcttctacatttttggcaagtttcatttttttggcggctttgtgtcccatgaatcctttatcgtaaactgtacttctatgtcgaatatcgcctttcatcttggctcccgcatttttgttgctttcggaacgctgggcaaaagtttgcatcttttgttgactggcatggagatttttaatttgcttttctaactttgcattataagcgatattagattcatcctctaattccttttgtttttcataacgagtatagtttccttgttccagcctaattttttgcatttcaattgctagggtgtgatcgacaactttatctacaaaatttcggtcatggctgattacaattaatccttgttttttattatgcagatattgtgctacttgatttcgtgtatcttcatcgaggtgattcgttggttcatctagtagggcaaaagaatgttgattaataaaacaaagcgccagtaaaatttttgtttgttcaccgccactaagtgttgaaaagggctgccaaatgatattttctttagcatgaagcagatttaattctcgttttaactcccattcctcgaaattaaactgttcttgtaaagcataaatagtaaggttatcgggattattaattacctgaggatagtaattgaattctaaatcactttgaatagttccttgatattcgacctgttttagcaacattttcataaaagtggttttgccgcgaccattacgaccgattaagccaagtttccaattagaatcgagatttaggtttaaattatcaaaaattttatcctgaccgtcataggcaaatgaaacgttttttagtgaaattgtagacataaaaaagcaccgtcctctcaaactgtgcttatgatctgagaaaatggtgcctgatagattagtccaagttggctaatctataattattcttaatttaaattaaagaaaatcacgcagactaatttctgatcacaagcaaaaagtacatccttaaactagtagaatgcattattttttacttaacgaaaatcagaaattaaaaacgcatcggcgtgagtcctcctattacttgaattgattaatctggcaatactttaccatcaaatataattatttgtcaatatttttatgataattcatttgcaagctgtgattaataaggagactgtaaaatagtttgtgtaaggatgaatgattccttaaatttatttctttaaacattagaaaaaggagttcctttctcgtatgattggtttgaacaaaaaaacacatacagaaagaagaactccttcatgaatgattttacccaaaatatggcacaagctctattcaatcaagacaaaataaacgatttattgcgcaaagaactccagcaagcagttaatgacttattagaggctgaactgactgcgtttttaggctatgatccttatgccagaaatggctggaatacaggcaattcacgcaatggtgcttattttcgcaaggttgatacgcaatttggcgagattgaaattcaggtgcctagggatcgaaacggcatgtttcatcagcacacgctccctgactacaagcagcactccaatgtcttggaaagcatgattatcaagctatattccaaaggcgtaaccactggagaaatagccgacttgattgaaaagatgtatggcagtcattacagcccagctcaggtatctaacatctccaagcagatgattccaaaagtcgaggcctatcatcagcgcaaactcagtgacaagttcttctgcgtttatttggacgctacctacattcctttgcgccgagaaacgtttgagcgtgaagcagtctatattgccattggcatcaagcctaatggtcacaaggaagtcatcgattaccgcattgctcccagcgaaaacgtcgagaattggacgggaatgcttcaagacatgaagtctcgcggtctagaacaggtttagctctttctttcagatggcgttgtgggcatgaagacagtgctggagcagacttatccgaaagctcattttcaacgctgtctagttcatgtcatgcgcaatatttgcgctaaagtatgcgtagatgatcgcgaaacgatcatgaatgaattcaagcaaattcatcaacagccaaataaggaagccgcgatcaaagtcttgcacgctttctataacaagtggaacagagcgtacaaccatgtcatcagaaatctcaaagagattgaacctgatctgctagtcttttacagctatcctaagcagatcagggcttcaatttactctaccaatatgatcgaatcctttaacaacgttatcaagcgtaaagctaagcctaaagcagagtttccaactgaacagtcgcttaatacttttattggcattcaggcaatgagctacaatgaccgttatttcaatcgaatccacaaaggctttgatcaggttcaggataccttagaatcctactttgattaaataaaagattaaaaaatcaatctacgagaaaaatctatttacacaaaaaatttgacagtttcagattaaatttcttcactacttaattcaaacatattaataattgatttaaacatagataaaagttgtttaactattaaaaatgaattttgtgaatataatgttatcgataacagaaatcatttttatattgcaaatgaaagcgcatacgtttattgttgaatttgaaaaaacatgattttgtggaggaatttatttatgaataaaaagagtggtcataatatcaaatttaaatcaatttttgtatgtacttcagctattatgagtctttggttaggggcaaacttaactacgactcaagttcatgctgcagaagacaatgcagctcctaaaagttcagaagttgtaggccaaacgaattctagcaaagataatgcagctactgctactgtacaaaatcaaagtaacgcaaaagcaaagcagcgtcaacaaggtgtagctcctcaaaacgttcctacagttttggcagccaaaactaaagatgagggaacaaataactctccagcacgtgaggaagttaaagatcagactaaagtagttattcactacaatggtgatggtgaaaaatgggttccttatatttggggtaagaaacctaatggtaacggcaatgaatacaaatgggccggcaaagatgataatgggtattactcggttattgatttagataaaaactatgaccaagtaggagttttaattaaaaccaaaggcagttgggctggtaaagacggtacaggtgctgatcgtagcttaaatgttagcgataatggcaaagcggaagtcttctataaagcaggtagtgatgatgcccaaaaggtaacaccagagtaccattccgcaaatataaatttgcattattacggtgatgaccaagttaataaggttaatgtttggacagataaggatcaagataataaacaacttattagcttaaccaaacaaggcaatagtcaagatggctcaatcaaattagacaatactgattttaataaactttttgttgcgccagttggttctgatgaaataacaagagaattcactccgttaccgggtaataaggcgacagatatttatttagttaaaaatgatacagaagcttattatagcaagagttttgccttagctgatcaaagtctatcttctgcatatatgacttcaccagatagtttgactgttgaagcaggtaaggctactactgtcgataaaattaaaggaaaacttggtctgcgaaataatagtattgatcatattgaagcagtcgatgctaatactgatggtaaagcaaagaaatttattattcataccaaagcagatattgatattttaaaggataaccaagttggactagggatgaactttaaaaatgttgatatcggtccttatgttcgttccaaagcttttgacgataaatatgcctatgatggtgacgatctaggctgcacctatgatagtaaaaagacgcaaattaaactctgggctccaactgctaaagatgttgaattgaatttatatgatagtgttgataatagtgccaagcctacgaatgttattgctttgacaagaggcgatagaggtgtttggactggtattattaagggcgataaaaaaggctgggcttatgattttaagttaacttttggtaatggcaaaataacacagactgatgatccatattctaaagccgttactgtcaatggcgttagaagtgtaattgaagactacaataatatcaaaccgacagattttaaccgaatgccttcattctctaagccaactgatgcaatcgtttatgaaacttcaattcgtgactttagtagtgatcctaactcaggaattaaagataaaggtaagttcttagggatgattgaatcaggtaagacaccaactggacaagttactggtttagactatctcaaggcattaggcatcactcatgttcaaattatgccttcatatgatttcgctagcattgatgaaactaagagtttaaagaatcaatacaactggggttacgatccaaagaattatgatgtgcctgaaggatcatattcttctgatccaactaatccaactgctagaattatcgaaatgaaagaaatgattaatggcctgcataaagctggtattagggtcattatggacgtggtatacaaccatgtttataatcctcaagagcaagcttttgaattaacagtgccaggatattatttccgttacgatgctgataataataccacaagtgatagtggctgcggtaatgacattggtagtcaacgtaaaatggttcgcaagtacattgttgactcagtagtttactgggctaagaactacaatctagatggctttcgttttgatatcatgtccttactagatcgagagactatgaatgatgttagagctgctctagataagattgatcctggtattattacttatggtgaaggctgggaagttggtaaccagaaatatactagagaagaaggaacgacccaatacactgcggataaagttcctaatgttggtttctttagtgatgatatgagaaactcggttaaaggtaatgatgatggctccgaaccaggattagtaattggtaacggtaatgaaagaaactttgataagcatgctgtcttgtttaccgatagttttttaagaggtaaatggttacataatgattcttgggagccacataactatgcaactccaagccaaatggttaattatgccgcttgtcatgatggtaagacgttgtatgattacatcaaggctgcaatgccaaatgaatcagatgagaatagtgccaggagagtaagattggctaactcaatgatcatgctttcacagggtatttctttcttccactcaggtcaagaagcattaagaactaaaggtggcaattcaaattcatataattcaccagtaaatattaatgaaattaattgggaaagagttggtgctaataaagcatcagtccaatatttccaaaaattggctaaattacgtaaacagctgccaattttgcatttgaatgatttcaataagatttatgacgagaatgttactaaaattattagttatggtagagaaaccaaagataaaaacatcaagggtgtatttgagtacgaatataatgttaatggcaagaagttattaattgtctttaatgtcaacaatgataaagttgctctaaataatgttgatttatcacatggtaagaaattgttagatagtgatggcaatgtgaaattaagtgataaaactatgctggcaccattaagtacacttgtagttgatgaagatggaacaatggttttaccagacgtgccaaaaccagatcagcctgtaagtccaaccactccaggtgataagccaggtaaaccaactacaccagaaaatccaaggattccggatcaaaagccagccaatccaattgttccgcaagaaacaattattacacctgaagctccaggtgaaaatagtattatagacaatactaaaaatataattaatggatcagaagagactactacagtttctactcaggataatacaaccactgaaatattattgacccataatgcttatgtgtatgacagtgaagcaaatcctatttatcaaaatgataacaagcttgtcttgaaagctggagatacaattaagcctttggataatggtaaaaagtatagtattaaaggtaagttgttctataaagtagctaaaaatcaatttgtcaaagttgctaatactgttagttactataagttagctcataactcattcgtttataataagcatggtaaagcagttaagaagaatggaaagcgcattttacttaagaagaataagcatatttcacttcattctgataaggtcgttaagattaaagggaagaaattctatcaattaaaagatggtagctttattaaggctagaaatgttaaaagaattggttagatttagatagttaattaaaaatattaaaaaacaagattgtttccaaaatgggcaatcctgtttttttaatcctgattaatcaagctaacgggcaaagtataaacactctccaatgataccgctggatcattaatttcgcaatctctttagtccgttgccgcgcactaattaaatgtgggaataggttctgaatcaattgtgtgccgtcaaatcctgtaattaacgattttttatttaaataatcgttgcattctttagccaataaagccgtaatgtcatccgtacaacaaatcgcatcgtaatcgttatctttcaaaaattgaaggatagcgattacgatgcgataattgattcacgggcgctaattgagcgtaaatcaaatttaacgtcaaaggtattaaacacacacatcatccctttgatacgatcactgattggataatagtcttctttggaaccagcaataatgattactttcttctttttttgctttaaaaccgactttgcaatttgcatctccgcatcatagttattcgactgcacagtagggatctgcggactaattacccggtcaaaactaaccaccggtagattaagcttgccactcttctttgaaatctgaattggcgagctggtaagtaagcctacgatctttttttgcttatatttatccaaataatactgcatatcttgctcttgataatgatctaaatgcaaaatgcaatcataacctttatcctgcaaaatagtagccaagtattcatacagttctgaatagaaaggattattgatttgcgaaaaattgatttcaattaagtttaattctgttttagcggaaattgcattcttgggtttataacccagttttttgatagcttcctttatttttaaagccgaatcaatgccaacgtaaccattctgattaagatatcgcgaaacggtggcaatagaaacgccggcttttttagctatttctttaatagttactgccatgttttacacctttatatgtaaatcctacacactttctatcagtaagtatagcatattctaaaacctgaattgtcaaattaagtgcaacagttaggctatgaggaaatatattgcttgaagagttcttctgctgtgtgatattgaaggattcgacgatgtttgcggttaatggcatcagttgcctgttgaacataagcagctgacttatctttcatgcttttgcctttagggaagaattgacgcagaagtccattgcagttctcattggtgcctctttcccatggagaatatgggtgggcgaagtagatctggcagcctttgatcttggtcatatccgcaaactcagagccattgtcaaacgtgatcgatttaaaccaggcaggatgtctgtcaatctcattttgaagcagcctttggcatgtgcttgcccgatagtcaggaatcttgataactacttcaaagcgtgtggttctttcggtcaaagtcattaaagcaggctgattcttgcgtctgacgcctttaaccagatctccttcccagtgcagcggcgtttttctgtcttcaatctctttaggacgctgttcaatggaattgccaagattcttcttgtgcaaagcatgaccgctatggccgtgatgacgcttgttcctgcgtcttttgagcttcataggcagatcaatattgcttatgtccagcaagccctgatcaatatagcgatagacggttggtgtgctgggacaagggtagcctggcatagtccttttgaattcaccaacgaattcatcaatgctggtggcatcaaatttagctttaaagcgtctggagagcattctcaaaaagacagcataatgcttcaatggattgcgctgatagcagtttttgcgacgcttctcataataaagctgtgcagtatcagcgtaatagtgctcatacaacaaatagctgctgtctctttgcaggacgcttccgcgtttgatttcgcgactgattgtcgacttatggcagccgacttcttgagcgataacagtacgggaagttatgccggaatccagcattgcttgaatttgtccacgttgtacgctggttaattgatgatagtgcttagaaatgctagaatttgaattggtcatgaagatcttcctttcttgatttttcgtcacttcaagtttaggtcttcatggcctttttgtttaacacttggtgttgcacttcaattttaaatccgggtccattattaattcctttcatagaaaactaaattccttttctaaaggggtcaagagctattatatacagttttctcagcagttacattcgcaaaaaagaaaaatgctaaatttatttaaaatatttagattttttatgcaataaggacaaatagctaggagaaagaacaaagaatatctccccatctattgatgtaacgctaaaacataatttactttctttgtaattttgtgtatactaaatatacacaaaaaaagaaagaggcgtacaactatgactgtaaaattaagaaaagttggaaattcaaaaactttaacagttcctaaagatataataattactagtaaagagtatactgtgaaaaatgaggggatgaatatagtttttacacccgtcgtgaagaaaaagaaaaatatttttgcaaccaaagaatggcaaaattatgattatcaaaaagacatagaaaatgacgtggaactacaatcagtaaaaccagtgggacgtgaggtagttgattaatgatttatccgaaaaagggagatattgttaaagcagatgcagaacctcattccggacatgaaatgggtggccataatccgcataaaggtaatattagaagacattatgtggtaatgagtaccagtgcctataataaatcaacacatatgtttatagggatgccgattactacttcagataaatatcaaggcaacccacattacgagccaatattaattccaggcagtaatggcactggagtaaaaggttatgttgttttatggcaacttcagaattttgactttgaatctagaaatggagaaattgttaatcacgtaaatattcagctattagacaaacttcaaggtttcgtgaatgatatggtgggactagaataggtaaaacaattatgccaattttaaggctagttcgattatgctgagaggacgattctgaggtcaagttcgactgcagaggttaaaattaatcatttaatgcaatagaatgctaattcttatttttatgggaaattagcattcttttttgtactttctaactatgtagaataatgagattttattctacatagtacatctaatcatgcattattctgctactaagtgtataattttttacggtaagttgaataaataattaaaaaagcccaagtcctttgaatttggacttgagctcaaacaaaaagaccagtagtctgatgttaagaacaaaaaacacattagaagctggtcttttatgaattcaattgtaactgaaatcgcaaatattataaagtctgaagataattatattaagcgtgaaagaaaaataatctgtttcttcttaaacctgattaaggaaatcatggccttggctttagctaaagttgatgatgaaatgattaccaaggttaaagcacagggctatcagattgataagaagaatgagcgctcaatcaatatggcttttggcgaagttaggtatgtcagaagaagatatgtctgcccaggcaaacaagcaaggtatcccttggatgaattaatgggctttgacaaatacaagcgctacagtattttagcagtcaaaaacatcttagaagtaagcagcgttgccacttatcgcaatactgctctagcagtcaattgcctgtctggctttaatattagccatatgcaggtgggcaatttggtaaaaatggccgggaaaaatattaaagcgggccaagaagcagattcaagatatgatgccgcaggcactaagaaaaaggtcccagttttgtatcttgaaggcgatggcgtggtgatcaaaggcactaaaagccggttggaatttcatcgctatcaggtctgtgaaggcattgtcaatataagcaagaaacgcagaaagcgaatcaatgccaaggaatttgtttctttaagccgacttgatgcgctgaacgaagccaaggagtacctggccaatacttatgatctttctgatactgtaattcttagcaacgccgatggcggtgctggatatgccaaaacagacttcgatgacattgtagggctatgcaagcgtcatgagcatttcttggatgtctttcacctaaataagaaaatcaaagaaaggctatattttgcgcctgacctgcaaggcaagctgatttctgctttggaatacaaatacagctatgacaaagttaaaactatcctaaccactgcagaaagccgactaattgatgaattgaataccgagctcaatcatgattatctggggcgcctaaggaattatattgatcgtcattgggacgatattaagccgtttaagaaacgaaaactgactgtgactaaagccattggctgctgcgagagcaaccaccgcaagtatacctaccgtgttaaggggcaaggcaagaaatggtcaaaatctggagcagaaggcatgcttaggatcttaagctgcatcaagaatcgagagctggaattttggcttagcagcgagtttgaagattcagaaataactgtattgactgaacaggaattaaaagcagcggcccgtgacagcttaaagaagcgtcatgaagttcatttaggcatccagcatggcgcattaaccgcacaggtagctggcaatagttatttaagcaagctaagcagaaatttaagtcatataaatatttaagaaattaaggttagactaatggtttaaaggctaccgcaaaaacattgacacttacaaataataaagatattttggcattattcaaataataggttataatatttttgttacggagtgttggcagagtggtaatgcaccggactcgaaatccggcgaaccaagttttccttggcgcgcaggttcaaatcctgtacactcctttttgtcaatatgtggaagatcaagcagatacttggtctttttttatttttgaataaatgtgaaataattaacaatataccttgtcaaagatagaaaacaagagtaaacttatagacatcatcattaagggagttgtgtttgtcaaattaaattgatcacatatggagggatttttgttgacaaacataattaaaactaaatcattttggttagctgcaggaatgactttattttgttctgtagcaggaattttcttggctaagttgccatatgtaaacttaattggagctttggtaattgcattgctgttagggattgcattgcaagtgacgccgcagagcgttcagactgaagctaaaagtggtatgggttttatctccaacaagtttttgagattagggattattttgttgggctttcggcttaatttgaccaagttggctgatgctggtgtgaagacaatcttagttgcagcgtttgcagttagtgggacgatcgtgcttacttattggctgagtcgcaaatttggcgccgaagatgagcttgctattctttcagcatgtggttgtggtgtctgcggtgcggccgccgtcatgggtgtgtcaccacagattgagaccactgatgaagaaagaaaaagagaaaatgaagttttggcagtggccgttgtctgtgtgatggggacgatgttcacattacttgagatcatgcttaagccgctgcttggcttaaccgacacacaatatggtgtagtcgcaggtggttctttacatgaaattgctcacgcggttgccgctggtagtgcgtttggtgagatcagcttggatagctccttaattatgaagttgtcacgtgtgttgttattagcaccggttgctttaatcgtgggttactggtaccaaaagcgtttggtgactgaaagtgaggcagaacataccaaggcgccaaagaaattgccaattccttggttcttgggtggctttatcttaacgagtattatcgggacatttttgccattatctgctcaaacactggatctcttagtgcaagccgcatatgtctttttagggatggcaatggctgccttgggaatctcagttaacttcaaggtgatcttcaagcgcggtggtgccgtgttcggtgctgccgcaatcagctcaacttgtttgttggtctttatgatcatcatgagtaaaatcttcttttaattgaaaaaacaaaaaatcagagccgtcgaaatgatagctctgatttttttgtttagaatttgaagttgcgcatgaagactggcttagtacggtaatccaagtagcccgcggtaattggcgtgatttcaaggacacgtaaatcttttttagcaccttctaggtcatcggcataaatttcattgagataaggattcttggcgaaaatttcatcaagatataagtgatcaacatttttgattgtaccacgaattgaaaaaccgcaatagtccatcgttccgtccccccttgtaaccgtccacgataacttttggctgagcaatcaaatccttaaaaaatggattttgacttgaagttgcgatatataatttaccgtttttgttcaataataagtcgcaaacttgggcgctaggctcgcctgcgtgagtagtaacgatatcggcgttgtgaacttgctcgaccgcaaagtctaagaattcttgattagtagtttgcttagttaaaatatcaaccatgattgtcacctttcttgctcattatttctctgaagattattatagtcgcaaatactgacaaatattgacagaaattaaattataaatctttgattttcttgatcatcatcaagtttttagagttcttttgcttttatgataataatcgtcaggtaaaggaaaggggaaaaaatgattaaagtacaacgctttttcataaagtataaaaagcaaatcctgcttttaaatacaattttgttattgttggcagagggatcaaaatggttgttacatttaaatctgccataccagttgttaatgctggttgtggggattattggagtaattccgattgttttaacggcaatttcatctatcaaggttaaattaatctcaattgatgttttagtttcattagcagtacttggtgcgtttattattggtgaatttaatgaggcagctattgtaacttggttgtttatgctggtggaggaagtcaccttgaagaaaacacgctcagctatctcagatttaaccaaaatggctccaacaacagccttggtaatgcaagatgatggctccactaaggaagaagacgtcgattttattgatccgggtacaaggattttagttaaaacaggtgatcaaattccagttgatggaaaaattgtttcaggatctggctatctgaatgaggctagtatcaatggtgaatctagcttggctaataaaaaaattggcaatcaggtttatgcagggacaattcttgaagatggaacattgacgattgagactattgcagctggagaggatacaacttttggcaagatcattgaaatggtagaagaagctcaagataccaaatctcatgcagaaaaattgattaaccgcttttctaaatattacacccctgccgttttggtgatcgcaattatagttggcctaattactagagatcttaaactagcaatcacagtaatggtattaggatgtcccggtgctttgattattggtgtgccggtgtcgacagtagcaggtattggtaatggagcaaagaatggcattatttttaaaggatctcaagtaatggatcaaactcgtaagattgacgaaattgcttttgataaaacaggtactttaactgtaggtcatccggaagttagtgcgatcaaaatactaaaggggcaacggaatgaaataattaggcttgctgctcaaattgaacaacaaagtaatcatcctttagctcaggcgattgccaagttagataatcaagcatcagatgtgattaaagtagaaaccgttaaaggaaagggcctaattgctactatttctggtgaaaaatattatctcggtaatcaaaatttaattactgaaaatactcatcttaatcaggaattattacataccataaatcatttaagcaatttaggaaattcaattgttgtttttgctaatgcagaccaaagtcaattagcggtattcggtattaaagaccagttgcgcccggaggctaaaatagctttaactcgcttgaagaaattaggcgttaaaaaattagttatgctttcaggtgataattttaaaacagctaagcaagttgctgcagaattaccaattgatgaagtttatggcgaaatgttgccagcagataaggctgcttttgttaaaaaggagcaggaaaagggttatcacgttgctttcattggtgatgggattaatgatagtcctgccttggctaacgcagatgttgctattgcgattggaagtgggacagacgtcgcaattgatgtttcagatattgttttagtcaaaaatgatttacgtaaagttagttatgcaatagatttagcaaaaaagacagttcttaatatgaacgaaaatattgctattgctttattaacagtattactgctatttattggtctatttgctggttatgtagaaatggctagtgggatgtttattcatgaatttagtattttagttgttatcttaaatgggatgcgattaattaggtttaagcaaaaacttgatcatcatcaagtttctaaaaaacaaatcgatgtagcattaaacatgtaaactaatgggaaggaaatttagataaatggaaaaagtaatgatgaaattggcaggtatgacttgtccttcatgtttgactaagattgaaaaagcagttgataatttggatggaactgatcaaattaaggtaatgttcaatgcggggaagctcaagtttacgatggatccagacaaagttaaagcagtagatgttaaagctgcaattgaaaagatgggttatgaagtacaaggaatcaaggaaaaggagcttaattgatgaatgcacaagaaaagtatcaagcagaattaaaacaaagtgatcttgatcatcatcagccaactgcagcggcaatgactggtcatattattgatattaagcaaaacaaaatttaataaatgtcgatatatcaacgcttaacagcaataaatcggcagtaataactatagtgaagagactttttacggaaaaattacgtaaaaagctctttttatatatccaatttgttgatcgattccgcaacatgctcttcattttcctttgtaaagtgagagtaagtatccatggttgttgaagcttttttatgaccgagcaagtattgtatatctttaatgtttgcattattttttccattatttagtaaagtagccagtgtgtgtctaaagccatgaggagtgattcttcgtagcggatagttgttatagagcgtcgtaatccaatgatctggtgcgctacgctcataaaaatcgccattatctttgtggaagataaaatcattgccttttttatagattgtttcttctttatactcctttagtactatagccaactgatctgataaggggactttgcgaacggacgcaggtgttttggtaggaccatagattttgttgccattttcatctgtactgatagaatgctgaataaaaatttccttgtttttgaagtcgatatttttccactttaaagccagtgcctcacctgggcgacagcctaaattacccactgtcataaagtagacgtaatatttttctttatactttttggcacattcaagaaatgttttcaattcgcttaaactgtagaagttattagcagggtgcttactttttgccttcgtttttttaggcatcacaattttatcaaaggggtctctgtcgcaccaatcacgtagaatagcatacttaattactctgtgtaataagtttaaaatagaacggtaattaatatgagtttccgccaatttagtagcaaagctttgtaagtggttaatatcgataccgtcgatatatacgcctccaaattctttctctatgttgttcttccaattagatttccgagttcttagcgtagacccacgtacatcggctctataaacttctagccaaatctcatatacttcttgaaccgtttttcggttttctttctgttctttcttatgagtaaacttactaggaccctcttcttttagtttggtcttagctgcttccgcttctttgtagctgtcaaagccctggcgagatggcttaactgccttaccggtttctggatcagttccaatatacgttttaaatccgtacttgaccttgcccgacttcaatttgtacttgtagatctcattgtcttttctacgaggcatatatcatcatcctttcaaactaacgttctaaccaactgtgtaataaatcctgcttacctgaatagggtaggcaggatttttgttttctattcgtttttgaaccagttcgctgattgtcttaaagcaacccagtgaccacgccagccaccgtatacacgccatgggtagtcatgaccggaatacataaccttcaagtctgatcctttctcaatgtaagtcttatgagttaacttactttgatacatataacgtccaaccttgaccttatatattggtgtttccttggttacctttacccagtgccagtggtgtgagtacttgctaatggcttgcacggtttgagtaggtgccgtagctgtagaaatagcaccaacgccaccagctaacatgattgaagccattgcagcagttaaaaatctatgtttcataattctttacctccaaaatacttgaataaaaaaagaggcatacaagataacttgtatgcctcgctcaacattctgagcaatacttataaataagaccatagcataatgcatatggtcggcaccattctgccgataaactaattatagcatacaaatgattattattcgattcttctaattaatcctcatcatcctcaaaatcaaagtcaaagtttggcttgtattgctttaaagttacacgagttgctggaaaagtctttttatgaccatcgaagtcttctattgtgtatgaactagaaacgtcactggcttttgtagctgtaagtggaatagatacgctaacagtaccatcctcagagaagaactctttatcagagttcattactgcctttgcatcaattccttcaaatggacttaaatcgatttgatcatcttgtgtgaacaaagtatccttgctcgttttgtcgcttggataaacaaagacattcttatctatccaactagtaggctttaaaggagtataaattctattagatttgaaggagccattgattaagacatcagtatttgggagtccgctttcttcaaagtcaacgacttgaatagaatcaacagttaatttatttccacgttcatctgtaagagtgttaccattccagccggttttatgaagcttgtagtagtctctaaaccatttggtgttcgcacgtgtgttaacccaccaatagcgactgccaggtttggtgccgactaatacccagccttcaaactcaccggcttttctaactctaattacatctgagtaataatatttcttagtgccacgaacgaatctatctttcaaagcatcgtatcttctgaaagttacttttgtgatattaactctcacttttcggttcttatcccagtgagaagaagagtaaggatagatacttgaagcttgaacagagctagtagatgaagccgctactgtataggatccgccaagtaaggctaatgaaacagcagccattttaacaaatttattcataattaatcctccacaataaggcacgaagtttaacgtcattggtgtcgtttgccctggacgatttactggttctggactatgcaaccatcattaaataggtaataaaggttctgaggaatgcaaaaggcttcagcaaatttatagtaactgtcgaaatgatactcgttatcatcgcaatagttatgaagcaacttaatagcgaaaatatttgcatcagcctcaccacgattcacggttcgatcatttaagttgtaataatgctgatcttcatttaagacatgtgcgatttcatgagctaactgaaaaggaatttccaatgggtatggccaacgtgcattcataataattaatcgacccatgttgttataactgataggcggcgcaagtggtggaagctgattggtaaactctacaccaatgtgataatcaaacattgcagcattcatcagatattttataagcctgtcgtagttttctttgttttctatagatagctcgtcaattaatttaatcttcatgatgttcacgattcttgttcaaatattctgggtgatatttaaagaaactttgagcaatattggcgtaagtatcttttagctcttccggcatctttccgttataaggcataggtgtctttaaatcctcccacgtaagagcagtatcagagggacgatcagtagaattaggatcatcagtctttcccatcaaataatcagtagatgtattgaaaagtcttgaaattgccgtgatagtttctatatctggctctcgtttaccatattcataatttgcataagtagttaatggaagatgcagtcttgtagcaacatatgtcttagtccagcctacattttctcgcattgcttttaatctgttactaaaaacactcataattacacctcttcgcgtttaatttcttctctttacgagtatattgtaaattcttattcgctatttgaaaacatttcttgtcaaaaagtaaataaatatgttgactcttctcaaaacgggtagtattatataactgtaatcgatttacacgaaatgagaagaaaggaaatggtcggatggcaagtgtcttgaaagataacgcaagaaaattggctaaacaatacttgcgtgaacatggcattaagcaaagctggctagctgataaactaggcattagcgagccaacactaagcggaaggcttaacggaagatataagtttgatgctgattttgcaatggctttttcaaaagcattaggtatctcaccagatatttttttgaaataaagttacccgttttgagaagaaaaggagagcaaaaaatggaagaactaatgaaagttcaagtcaaaaacgatcgtcaacttgttagtgcaagagacttacataaaggtcttggactaaaaggaagatttagcagatggttcaaaactaattcagaactattcactgaaaatgaggatttttacaagtgtacatcaagtacggttgttaacaacggagctgttcgtgagttagatgattatttattaaccattgaaatggctaagcaattagcaatgatggcaagaacagaaaagtcaaagctttatagagaatatttcctagacctagagcgtaaatggaacagcccagaaatggttatgcatagagcattggaattttcaaatgctcgaatcaaacaacttaagttagaaaacaaaaacttgagcattcaacttgaggaaagcaataaaaaagctgattaccttgatgtgattttaggaacacctgatgcattagcaatttcacagattgcagcagactacggatacggtgcagtaagtttcaacagattacttcataaagttgggattcaacatcgtgtaaatggtcaatggattttatacagagcctacatgggtaagaactatgtaactactaagccatttatctataaggatcacaaaggcaacaacagaactagtctttcaacttattggacgcaagcaggtagaaaacttatctacgacgttctaaaagataacgacattttgccactgattgaacgtgacgacattgcataggaggtgattgaaatgaattgctacaaaaacatacgtgaagaacttgaagcactcaatgaacttaataattcaaaaacagagtttggaatggttaaagagttcgatggcaacggtggtgttacacgtccagcaactatcaaagatcttcaagatctcaacagtgaaattatcgcaagcatctgtgatcaacttggaatgagtgacatctatctaggaggtaataaaaaatgacaattctagcagctatgtccactaaagaattgtggtcgaagttatgcgacttgcttattcaaagaatggcactcgatatcactaaggaagaatgggaaaagttaacagagcaaaccaacaagatcgatgctgaattgaagcgtcgtggtgaattacttagttaggggtgtaaatcatggatttactgacaagcaagaaatgatggcaaagctgaaaatcagccggtcgacattgatgagacgtacaagagattgtgaacatagtccctacaaaaaagcagttattcatgacggagcacgaagattgtattaccgcctagaattgtgggacaagttcatggaatacagaactgataagtattacgaagaaatttacggaatcgaatcaattcgagacaggagcgtgatctaaatggaaaagtttagtccagagcaacgtgaagaagtcagaaagattgttagagaagaaataaaaaaagccaacatgcaaagcatatcagcttcaaaagttgccgagattactaaaaaagaaattgaaaagatgggagccgaatttggctctgataccacgatctattaagaaggtcagcaatgaaaaatttatattttattttgattttaacaataagtgctattgctatagtgcttgatcgaaaagtgatcaaaaagcaaacaggttttgcattaagctggccatattatttgtacgttttgttaattgatcttactgtatgcgttcttttttacatcatttaaaagattaacagattcattattaatgtgtttggtgatcgaaaaccaggcgcttttatcatcaatttgcgaaagctttaaccagtcttgcattagtttttgataatcgggtgaaagatatggtagcaacttagaaccgctttttacaaattgatttctggcgttggcttttaattgccagccacccgtttgctcatatgtattaagaacgttagcagctgcaacgaaatttgtaactaaatcattcaaagtggaaattttatcttgtgaattttgaaaatgtttagttttaatttctaattctctcaacttattactatgcacattgttaacgatagttactatgacgggagaaattatagcagcaatagcaatcacggcagttatagtatcggcatcaaattttatattaaatcacttccttattgaaggctgatttaattgtagcagattgaaggtgataaacgatgcagcttctagacgaagaaaatttaactaagtttgtgagatccattgtgatctcgatgaaaccagaacttaaatcaaatctagataaaaaagacgtgaaaaagataatcgagctgtcctcacgtgagtggctcaatgttggtgagtcagcaaagtaccttggagttagcgatacaactttcagaagctggcgtaaaaagtacaaaattccgtctcggacaattgaagggatcacacgatggaaaaagtcggatttagataaattttggaaaactcgtggagtgaaaggttacttatagaaaaatgactaaaaaggaaattgaaagaaagtatggaaaaacaaagctggatcacgcactgagttacttctgcatggcattcgagaagatccttgagtttctatcaatcatcttcgtaccacttctagtggttcagcagaccgtactgtatggcgagaaccatccagacgtagttttgccagcattatcaatcgtaacggctttagtaattgtaattggtgcattagtcattaagcacaacaagaaataggaggaaacatgaaattatggaacagatttttaaatactttgtatctcgtagacaagcccatttccttagcgctgtccaacaaaattgccttgctaatagcaattgtttgcatgttgctagcgggagcttttctgaacttccagcctacatcaagagttttttaggcataaaaaaagccctttagctttgcagagctaaagggacaaagaaaaatatctttaaaccaaaaagtaactaaggagattataccacaatgctttactcacaagaacaaattaatcgcaagaaggaattagaagagcttgaaatacaagcagaaaatgaccctgacacattagttgttcagttgcctgaaggccgtgaggctttaattggcaaatctgctgacgacttcgtaaacggctataaatctgcagctcaatttcttaaaggacgtttaaatcattacaacggagatttaaacaagttagcagatgaaatggactacaacgatgtttcacctaaccattttgattttattttagatcttagcaactacggtgatgatcttttgaagtttatcgaagattcttataattgccaaaaattaaccagttatttaggtatggaggagtactaatcatgaacgaaaatcaattaattaaattagatgaaaaggctgtagcattcccagtcaactttgcacctgcacaaattgacttcagtggatataaccaaatgaaagatcaaattgatcagttacatgaaagtcttgaaaactatgatgtaacgcaagacaacctaaaagacgctaagtctacccgcgcaaagctaaataagcttacaaaagcaattaaggcacgcaaagttgaaattaaaaagaaagctgaagcgccagttaaagattttaacgataaagtggaatcgttagtggctaaaattgacgattcaagcgcaaaaattagtgctggtatcaaagtatatgaagataaggcaaaagccgaaagacacgaaaataatttagagcacattaagacgatgtgtgaatttgctgaaattgatcctacaaaaattaaatatcaatcaagctgggacaacaaatcctacagcaaaactaagtttgaaactgaagtcgatcaacaaattgctttgattcagcaagaacaagctcaacttgctgacaacatcaagatcatcagtgaaaaagctgaaagcttaggtttgcccgctgatcactggatcaaagcactagataataatcctttgtcattcgtacttaatgcaatgtccgaatacaaggaagacctagatgccgtctctgaagctcaaaagaaaaccaagttgaatgaacttaacaaccttaaaaagcaaggagataagtacgttgatcctgaaactggtgagatcaaagacaaggtgatctcacttaagttggaagtcaagggtactccatggcaaatgaagcagctacaaagtttcctaaaggacaacggtattgaatatcaaggattggagggctaatcatgcaattattagaaagcccagccgactggattggacaaatttgcttcaaagctatctcaggattgaagccagaagatgcattgaaggcaaaactggctttgatgagtgcatttgttaatgttcaaagaaagctgcaacagccaagtaaagataaacaaggttatggctataaatatgctgacttgaacggagttatcaaagctatccaagaagcaagttcagatgaggacatcgcttatattcagcaaccagtaaccgatggtggcaagaccggtattcataactacttgcttaatagtaaaggtgcgatcttcgacttcggttcttatatgttggacatcggcagtcctaatcctcaggaatacggtaaggcacttacttacgctcgtagatattcaatcagcgctatctacggcatcgcttctgaagacgacactgatgctaaggagtttaactctaagcctgactacatgactcctaaggagcttaaaggcatgacaattaattatgatggcaagcgtaaagacttaactgaagtgtttgcaatggctatggctggtgatgagttagcaaagcaagtaatcaaagacaaaggcaattcagttaatgcgaagattgctattaagagtatcagcgctatttatgagttctctaagggcttacttaaggatcgtgataaagaaaagtcaaaacaagatgccgaagatcaaaaaatcaaagaaattgttgatggcaagaaagattcaactaagaagaaagatccatttgcaaagctaggtgagtaaaatgaatcaaccaagttattactcaataatgccagcatatgttagatatgataaagatcttaaacctaatgaaaagcttctttatagtgaaataactgccttatctaacaagtttggttattgcacggcttcaaacaattactttgctccactctatgatgtcagtaaagaaacggtatcacgttggataagtcatcttaaaaagaaaggctatattcaagtagaaataattagagctgcagataaaacagtccagcaacgtaggatatacgtttctgtggaaggggaggtattgacaaaaagatcaatagggtattgtcaaaaagatcaagaccctattgacgaaaatgtcaaagagaatattacaagagataatactacaagtaataatattaattcttcttctaataaatcgaaaccctcccctcagaatgaaactgtggataactctaaagacaaatcagaagaagaagaaacaaaaataaattcaagaatgaataaattatggttcactatcagaaattacaataagacattcaatcagcatcttagacctacactaagacaacttaaacaaatcagattaaaagtttctatgttatctgatgatgactttgaaagtcttagcaaagtatatgatcagcgtgtttcagcatacttggtgaataacccaataggctacttgataacaatgctgaatgatgaaatcaagattgagaggcattacaagaaatgaatagacttagaaaattaatcacgtcagccgaccagctagttgacggaaaaaagtactggttgcaatccgaattttctcttacgaggtacgaatgcagattttgggaagttgacgagcatacagcatggttcactacctatgcgccgcatgctaggtttatcggcttaaccgagttgcttagaaacaacggagatattccgttttaggagctaaaagatgaaaaattcaaagtattggcatgatgagccagttttccaaaataggacaccagaatatttctatggctataaatgcccttattgtggtgctaagttaaagccaattgatgaaattacgctcctttgtaacacatgcaataggttttggtttttccaccatttgcaagaaaagggaacagaagactggtaaaagtaaaaggagttaaagaaatgacagataaagaaaaaagtaatgattgaggggtgaagattatgaaagttaaattactctggtctcattttttgcctgatttggataaaaagattaatgagtttattcaaggtaaaaaaatcatcgatattaaatttacggaggtggtttcggacgactacggtaagggcgattggtccgcactagtgatgtatgaagaaaaaagaaacagacactttaaacaaaaggaatttaatatttctgatggcgaggaccccaacgaattcataaaagttcatgatgttgttaatgcagtaacccttaaagatgagaataacgagctagtaacagtagtaatttatgaggatgaagaaaatagcagataaagcagacaaatgaccggcttgtagaaagaaatcatgatcttactagaactttgaagatcatgatggaaattaaaagcgataagtagcatatgaacagttacaggaagagctttacaagaggagcataaaaatgaaaataactgatagacaaatggtaattgactatttaacttctgctgcacttgtatctagtatgaaagaaatagaaatagataatcaaaaactaactagacaagatcaataagcggttgcaattgacttgattaatagagctttagttcttttagatgaaaatggtttgataccttttcttgaaaatattgatgctaagaaaaacagaactgatttcttaatgaatcttgctatgaggtcttttaattttgttaacaataatgaagaatttattagccctgatgaagaagaacatgaaagtcacgatttatgatggcgactggcggggatgcacttgttgactatgtgaaagcacatcatgctcttgtgcctgtcgactttgatcacaagtattcgaacatgagtgattacttgaagcaaaatatggaggattactaatgcaagcagataaaagaaaacgacagatccaaatgagatcaaatgacattatgaagtacacagcagtgattaactcactgctcaccgtcggtgcacagaaaagtaatccacggtattgcgagatcagttgacgatgcgctaaagattgtaaacgaaggattaatcggttatggctatccagataccgataaaaaggagtggtattaatggagatggctgcaattatacttaaaattcttttgatcatcttatttatgggcttactggtgatgacttttcttatgtttggtgcagttgcctgtgacttatttaaaattattagaaatcgaaaatatggacgtaaacggaaggaagaaaaatgatatcaatttggttcttttacacaattttgccattagtgatgatgcttattgttttagccacagcatcaaataaaatttgggcatttatttcaattttgccgatctggattatagcagcggttattacttacttcttgctaccgtcgagaaatctgctgagtattctctggggtaatacgttttatgggatattttatttaacgttagcttctcaggcttatgacgatgatgacgatgctagttcaaagtttttaatggtgggcatccccgtcttagtgattttgttcttagtttgtataggcggatcattgcactcacacatgtctgttaagccaacatgggattctatatctaaagaatattcaaaaagcacagaagcgccaacattcaagcgcaatgaaactccaattgcattagcacctaaaacagttattaaccgtgttagaaaagcatcgtctgatattccaaacacgcaatattattcgatttctgatgaaattcaatcacagtactacaaaggcaagccagtttatgtgattccaattgaatataacggattttttcaaagcaatagagctggtgagattcctggctatttcatcattgatgctactagacaaaatgcaacaccaagatttgttaagaaaccttattactacgcagtaagtggctacttcaacaaagatgcgtcacgtcaaatctaccgccacaatcctagttggcttagtttagatacgccacaacttgaaattgatgacaatggtgatccttattgggttcaaacagtttacaagtcagaaccaatgagccatagggttaacttcggcagattacatgtggctgtcctaaatgcaagaaccggtgtaactaagacttattcagtgcacaacatgcctaagttcattgacgaaggcatcacgactggcattgctgataagatcaacaacgattttggtaaatataagtatggtttctggaactggagcaagaccggcatcatgaagccgaccggaaatggcgttgaaaatggtgtaacttcagtcttcaacaaagatggttcgattagttacttcactgactttactactgatagaaccggtgctgattcagcattaggttacagcatgatcaatgcaagaactggcaagctcactttctacagaactaacaacattatggacagcgatggcgctaaaaataatgctgatcaagactacaaagctcaaaaatggcgtgctaatatgccaattctctataacgtaaataatcgtccaacttgggtaatgactatcctagattcaactcatgctattcgtggctattactacttagatgcaagcgatcaaagcatttatggaactggtagcaatccaacaagtgctctggattcatttagacaggctcttgttgattctggctcttcggcaggtaacacaccaggtgaaaagaagaaaaacttctctggcgtgattaatcgagctgcagttgtttccaacaagaacaaggcaatgttcatgctgaagggcaaaaatatcattttcactgtgaatactaatgattatgattttgccaacttaattagacctggtgacaaggttaagttctcagcaaatgttgttaagggcaagtcaattggtaacgtcaatgaatttgaagataaaagtttagattaaggagattatcagttgttagtacttggtgtaggagaaacaatcacggatggcgttcacatctatcgtttagaagacgatttgaaccttcatttctggaagttaggcaataaagctgatcattacgtaagtacagcaggcttgaaattgcgcttagagattcatagtgaggataaaaatgaaaccaattgatcaattaaagtcagtcttagctgagagtggttatgatgtcatcaacgaagacggctataaaatgctagagaatgcaaaagttattaccaccgttgaacaagccaaggtcattgcacaattggttaaggacattgccgaagccaattacaatgccggttattataaaggtagtactgatcaagcgtttgaagatgggaagaaattaggagaaatactcaataagcaaaataaataatgatgtgatgtagattttaaagtttgaagagatacaggagtgggacagtgtttttatttgatttaccagacgaagttttaacagcagaaaatgtagatgattttctcagcagccagattaacagaatggaacggctcagtggggttagtttatctagtccccagctatcacttgctcccgctcactcaaatggcgttaatagccaagaaaagatgatggaaagaaggctggcagcatttgatgttttgaaagcaatcaaatatgccattgatcatacatcaggtgtatctcctcagatactatttgaattttacgtcttacataagaaagtatgggaaatcaatcgtgactgtaatatgaatcataatcagttcggtgatttcaagaatgttgcattgaatcaatttgctgagtgttggatctcggcacaagacaagtattttcctgatgaagctgatcgttttgatttgcagatttatcctggtgaaactctagcagacgctggttggagagcagatcaaactacgcgaaaacgaaaaaatgggatgtaaccgggatgaaagtgggatcataccgggatttgaaaaggatttgcttgggatttaatcgggattaagttgggatcgcccgatgatgaaaaaagcagataattgttattgtcgagaaagtagataggagatctacctcgaccgatgcgacggaaattcatttttaccaattagatctattctccttgtaaattagagtgacagcattgcatactatgtggcttgcaagttacctggttcgaatccagatgctgtcatagcctcagaaatactgaggctgaatcaatcttgttgttttttattgaatttgaacccgaagattcaacaaatgcttgaagacaagataaatcatgtttcccgacgtgtcgcagtagaatacctgcctcacgtcttagctctgcgatgaccgcaagcgagcggagcattgatataaaaaaggactattgagtccgtgttctgataacaaggttttcctaacctaaccgcctgaaaaggcggccccttgatcatgttgctctgcatgcactgaaggtcggcacttcattagatcttagccagcagtgatgttggtgaactgataatcaataaatcattataaaaaatctctcaaattgtattaggtagtagtcaaactgctaccattctgggcagactcgttgtctgtccgtcgatgagtcgattattgcgagtttttccaatatagatttcctctgtcgaattaaattgaccaatggcggacagtttaggttcaattcctttactgctcatttcgtggttctgttagttaaaatcaagaacacattatgtatgaacacattcaggatcacgtattaaggtgctggttaaccccagtgctttttttcgtgtgaaaggaatcagcaatgtatcgcactaaaaaatatggtcttgtctcatgtaaggaagaaaacaaaatccttgctgaacttgaaagagatgtcgagcacaaaaagaaacacaaacataaaaaaagagggaaacaacatcatggaaaacaaagaattaattagcaagttgatcaaagaacgtgaaggatatacagaaagatcaatcaagattcaagagtttctaagatcatctgaatgtgcaaagattggtcacactcaaaagcaattattgattgatcaatctaatcaactaaacggcttagcattcattattaatatgagaattgacgacttgaaagacagcaacggcactgattaagttcagtgtcttttttattggcctgatttaggaggtgaaaccagttttgaagaaaaaagcaaagaaaaagaagtcaaaaactattccaagattgacaccaaaacaaaaagactttgctgataagttcattgaaattggtaacgccacagaagcctataaatcagcgtatgtaactgatcgaatgaaacctgaaacgatcaatacagaggcaaaacgtaccctccgattaccccccgtcaacgattatatcaacaagcgcatgaaacagatcgatgaagccaaaattccaaagcagaaagaggttttagagtttttaggtggagttatgcgtgggacattaaaaatcactgtagagactgatgatggcgttgaagagataccaccaaattggaagaatcggattgatgctgcaaaggagttactaaagagaatgccaattacagatgatccaatcacacaggctcaacttcgtaaactcaatgcagaggctaccttggctgaatcacgtactaatgaatcacaagacaagtccggtcgtatgcgtaagttaatatccaagaagtccgataagcaacttgaagaaatgattcaatctattgaaggcggtgatagcaagtgacagatacagcactactcgatgagtttaaaaagctaactgtcaatgaactaaaagatgaactggcttggcggtcatatcagaagtactttgaactcgtttacccagatatgacaatgtatccacatacgaagtacatctgttcactgcttcaaaaaatcgcagatggtgagcaacatttttatataatttcatgtccgcctcaacacggaaaatcgcttaccatcaccaaaacatttccaagctattaccttatgaagcatcccgaaaagcacgttatggttactgcttactcacaagacttatacagtcagtttgcagaatcaaatagacggcttttttctttatggtctcaaagagtaccagatgctgatcatgctttgcaagttggaaaaaacacggctcagcaatttaacattgttgatcatcgtggtggtttctatgcaacttcaatccttggtggtgccactggtatgagtgctgacttgttgattattgatgacccaatcaagaacgcagaagaagccggatcacctacgattaaagacaagatttggaatgaatggttattaacattcaagccaagacttcaaaaaggtggctcagtcatcgtaattatgaccagatggcaacaggacgacttggcaggacgcttacttgataattcaagcttcccatgggaagaaatcaaacttcctgctattgctaccggtcttggacctgatgaaacagacgtattaggcagacacaatggcgaggcactatgtcctgacttgcatagccttgatgaactacttggcaacaagcacgacatggggactcaaaagttcactgctttgtaccaacaaagtccaacagttgaaggcggtaatatcttcaaacgtgaatgggtgaagttttatgttcctgataaagaaacacaagtaagacttcacttaactgataaagacgcaaagatattgcctaaacacttggatacatcagtacaggcatgggacgcaactttcaagagcaaagccaacgatgactttgtcgctggtcaagtgtggagcaaaagtgacgctgacttatatctacgacctggctggtgtcacaagcgtttgtcattcactgagacgctagatgctattagagctatgacaaggttttacccagacgcaacaacaaagttggtcgaagatcgagccaatggtccagctatcattgatgccttgcaacacgagataccaggaatcgttgctgtttcacctggtgcagatagcaaggaagcaagagcagcatcagttagtccagtatgggaatcaggaaacatctatgtgccacatccaaagtggcgacctgaaatcgaggactggcttgaagaaatctttgcatttcctaacgcaatgcacgacgacaacgttgactcgatggtttacgcagttaagagacttcacgacaaccatagtcgtggaccagttatcagatattagaaaggaggaaacatgggactatttagcagaagaaaatcagaaccgaaaaagagaaccattgttggtgacggcatcgaccttgatccgtttaccagttatgacaatctaggctggcgagtggttaatgatgaacaagactacgatgcactgcacaatgagacaaaacacaatgctattgcaagacgtatcgttcataaaccagccgaagatgctacccgaaatggttttcgggtgattgtagaagacgatccagaacgtcagaagatgtatcaacggcttcattatgatttgaagactacacaagccttatctcagcaactcgtttatcaacgtgaaggcggtgatggttatatcactattggtgttaatgaaaatgacgatgccgattcaagtaagccacttgatccaaccacagttgaaaaagttcacttcattcatgcatttggtcaaaaccacgttgacaaggttttgtctaacgatgatccactcagtcttaactatggtaaggagcaggcaatcgtactcagaacacaaaacgccggttacaaggtcgatcctaacggtactcaaacgccaaatactccgagaaacactccaagagttattgatcaaagccggtattggcacattgcacttgataagtcgattgatgatgaaacaggtacgtcaattctgaccagatgtcaggatcaactcaaagcaatggatatcgcacttgaatcgactgggaagatgttacgtgaatttactttcaagttttacaagtctgatcagttgatggaagaaggagacgctgactttaaacgtgataagcgtgagattagccaagtacttaatacagaagcaatggcgtttggtcatagtcaagacagtattgaaaaggtagcaacaccaaccggcggtattgatttgctttacaacttcgtatggcaacagcttagtgctgcatgtggtattccaaaatctgttctaactggtgaacaagctgggacattagctggtgcatcacaagatgtcatcaactactacgacagcatcaaggcaattcagaccaacttgttaaagcctgaaattgaacagatcactcgtattttgatgtacgcaaacggtgatgaccctgatcaacttgattggaagatcgtattcaatgacttacaaaccatggacgataagacaaactcagaaatcttcatgaaccaagctaatgcttacagtagtttgatttctaacggcgttcttgcaccggacgaagtccacgacatgctagcaggtcaagacaccaaccctaacccagcaatgcagacagcaggtgacagtgttgatgctgaaactgtaaagaacattgtggataactatcaaaaagacaagaaacgagctgagaaacatgacgactcatagaagaatgcctcacactcgctatcctcgcaatcttgaagatgcttatcgaagacgcatcgttagattggtttatcagtggcgcaaagtcgctatggagtatttcaacgtctatatgggggactacttcaaaggcggtactcaaattgttggtgatgcacctaaaaagaacaatccgactgaaacagaacaacagaatgtactacataacctcgatgctatgggctacacgatcaaacaagccactagtgatgcaactattcgcaaaattgctgaacagtttgttagaacgattgatatgtttagctacaacaacgttgcaatgcagattcggatagctggtatcaacccaatacgtgatagccctgaattgaccaagatatttaacgcacgagttgctgagaacgtccaactgatcaagtacatgaaggatcgatatgcagacagcatcactggtgtcatctcacgagctatctcaaatggtgacggcaccggtgtaattacaaaagaaatcgttaaacaaactggtatgtcagtcagacatgctgcacttgttgctaatgatcaaaccggatcagcgcttgctaagttcaatgagagtcgacacaaagcggcgggcgcaaaagattacgtctggcaatcaatggaagataaccgagtacggcccaaacatcaagaactagatggcactcgtcaaacctacgacgatccaacgggcggtgatgatggacagatgcctggcgaaccaatcaactgccgctgtgtggctgatccgatatttagcttttattaggaggtaagacatgacagataacaaaccacttttcggtattaactcagagaaagtaacagttgacgcaccaaaaaccacaaaagatgcgccagaagtagcagttaatcacgaaaaaactgcgttaaacgctcaatcaactccaaaaaaggaggtgaaacgagtggcaaagaatggatttgattacacaaattgcaaaaactacacagttaaggaaggtcaaaccttacttgatgttgcaaatgaagtcttagttgcctaccaacaactacgttacttcaacggcttatccaagaccaacccagttgttaaggctggtcaagtgatctacattcctgatcaagctatcaacgtaccacttggtaagtaatgattacgaggtacgactcatcaacagtcagcgctataacaaaggatctaattacaggttacattcacgccagaaacgtgcctatcgcacgagctggcgtttttaaatacctgaaaccggatggcactgttcgtcatgaagccaaactgccagaggatatcttgtctgacagcacggtggcgagtgcaaacaacaagccaatcactgacaatcatccagaaaatgaagctggtcagcgaatcctagttgataagagcaacacgaatactttgatgaaaggtcttactgcgtcgaatgcccatgtagatgaggcagacggcacagttcgagttgatttgacgattaccaaccctgatttgattaacaaggtcgataacggcaagcgtcaactcagtattggctttcaaacgcaggtcgtgcctcaaagcggtgtctacaagaatactgaatatgactcagtacaaaaagacatcactatcaaccacgttgctgttgttgatgtggcaagggaaggtccagacatttcacttgatagatcagttgtcggcgatagtgccgaaatgatcggtgagctggacgattttagtaaagagaaagggcaaaaaccacaaatggattttgaaaaggtacgcattggcgatcaaacaatcaaggtcgctaccgatgatgctgataagttgatcaagtttgactctgacaattcagcaaatcaaaagagaattgatgaacttaacgcacaaatcaagaaattaactgatgaacgtgattctttgaaaagcggcaataagcaagctgaaaacgacaggtcagaagcacaagccaaagccgatagtcttgaaaaagaattgcaaggttatcgtgacaaggttgaaggcgacggtttagacaagttggttgatcaacgtatgggcttgatcgatgatgtgaagtctatcgttggcgacagctttgatcctcacggcaagtcagaaaaggaaatgaagattgaagctatcaagagcgttgatggtgattccgctgaaattgatggcaaggatgacgtttacgttaatgcttacttcaatgcagtaaagaaccgcaaacaatcacacttcgttggtgctactgttcacgacttcaagggtgacagtgctgagagtaatgtttcagttaaccaaatgcatgaaaacttctacaaccttgcaaacaagaataagggaggtaacaagtaatggcaattcctgatggaaccatgtaccacgacggtcatctatccgccggtacagttgaaagacaatacgaagtcttaacagaagtcgctagtgccgatattccattcggcgctggcgtttctttagttaacggtcaagcagttacagctactaaggcacctatctacggcgttgcagtaaagcgtggctacttagacgttgaccacttctatgaagacgacattgaaaaagataaatggcatccaggagaagttctcggtgttcttactgatggaactatcaatgttccggttaatgaagatgtcgaccgtggagaacttgccactgttgatgctgacggttcatttaaaccgaccactgcggacgatgcagttggtcggtttttaagttcggctgataaaggctcaactgcacgtcttttagtccgcactcgttttggtggcactaccggtggcgctgacccaaccaaggacgatgcacacgcaattcaaccacctgaaacgccaaccccagcatctgaaaccaagaaaaattaggaggtaatgagttaatggctcaaatgggagttgcaactaaggaacaattaacctatatcgatcaaactatttacgatccaaagactgctccactagttgctttgcaattatttagcactatcaaagtatacccaatccaaatgtcttacagatacaaggttcgttcaactaaggcaatggcacaagcctacgcaaaccgtggcactgacattccagtagttgacgaaggtttcaaggaatatgaagttccaattactcaatcagcattagcttgtgagtactcatggatggaacttcaagaagcacaagcagctaacgtcaacttgcttgctgatcaagctgctcttgttgctcgtggtcttgctgaacgtcgtgaccgtatcattttcaacggtatggatattggtcctaacactaaaattattggcttgactgacactaatacagatgtgaccggcttccaacaattagctcttgatggtgaccacgcacttgataagttggcacaagacacagaagacggtgccttgaagatgcgtaatgtcttacgtgaagcagtccaaaagattactcacttgattggttacgcaaacgcaaagccaactttattgatgccacaagccgaaattgacttgcttgataacccagtatcaaagcttcgtcctgacatcactgttagagacatggtttctcaatactttagttcaattcaagctgttcctgaacttgaaggtcaatactggcatgcaaagaacgcttcaaaggctgacaagcaaaaagatatggctattgtctgcttaactgacgaggacattgcacaaattccagttgcaatggaaatgactcaattacaacaggaataccacgacggtgttactaagattccttatgttgaacgtcatggtggtttggcagttcgctacccatcggcattcgttcaaattactggtatcaatacaccaactgctaattagctaaaggaggggaactatgaacactgatgatccagtggtaccgatcactgcattgaagaacgcagcacctaaattaactcagagcatgtcagacgacactctcaaagagctaattcacgatgcgaccgttaacacattggcggatggtttccctcagccagttgacggtaaatggaacgacattacgcttacagcgatcaaatatctggctctgcacttggctagcatggatacttctgctggtcagggtattttggatgaaaaagttgccgtcttggaacgtaaatacgagtccaaaattggcaaagattggctccattcaagcgtttggggcctttactactaccgcttatggaagttattctgcggtggcagtaatcgatatggagtagtgcaacattgagtatcaaaatcactgatgataaaagcgattgggacgcaatcaagcacgaaatcgacatattaaatcgctacatggtcgtaattggtttctggggtaacgatcgattgatcgaaattgtatctgcattggaatatggcgctgacatcaagccacacaagccggatggctggttaatcataccaagtaaaaatgatgaacttggtgaggatggcttacctatgagcagtagtgaatgggacgaaaagcatcctgatcaacaactgttccgaccaggtggcaaaaatggtgctcatgtcctagcggtcaaagacgcaagcagtgatacaggcttcaagatcatcttttatttgatgaaagaagtcaaaattccttccagaccgtttcttcgtaagacttcgattgaaaatgaacaaaagtacattcgattgacacaggtcggagtccaacgagtgtttgaaggtcatgctacaggaaaaggtttgcttgacaagctaggtgctgtcgctgttgctgacattcagcatgagatgcgcaggctgtataagccaggcaacgcaccaatgaccatcgataacaaaggtttcaataatccattgatcggtaaacatgctggcggtcaaggtggggcactcattaacaaaatcacttataagatcattccgaaataggaggacactatgagtttttacatggatgttacttcgatgttggacgattacggcgttgacattgaagtttggaaatcagataaaccacacacaggcgaaaaaaagctcgtgggtggttttttaatgtctgacgatcaatctaccttaatcgatggaaaaacagcagagaaacgacatgagccggttattccggttaatcagttgacatcacaactcattcaatatttaaccggcggtactcaaaccaatgcagacctaatgtggctgtcatctgggaagtactacgttcacacagtggttaatgttccatcacagggcggtttatttgaagtcactaactcttctaactatcaggactattcaaacctgatcatttacgaattgaagggagatgacgcacaccaacatggaaattcaactcaaagataatcttctgctgacttatatcattcagcaactggttaaagagcgtcttgattgcgatctgctctatcagaatttagtttctgaccgtccacaatatccttttgtcacttattcgtttattgtgccggaacaggaaacaacaggcgattggttaggcatgggacgccagtacatctcacacctacaaattgattgtcatgctgacaacgccattcaagcgatgaatatggcaaacgacctttacagtgcatttcaaagcagtgtttatcgtaactactttgagcaagcggatattgacccacagaattttacgaacacaagcgacagaacagtcagagttggtacctattacgactataggttcggctttgattgttcttttttagtgtccaatggcggtcatgtttactcaccggatgacctccacttccaagctcagccggaaacagaaatcaatacagtacaactcagcgacgctggtgacagtgaagttatcagcgccaatggaaaagaaaaggagcaatagcaaatggcagaaaccattacagacgttcgtccttttacgagagttaaggacgttgacgtagaaatgactgttgtcaagccacctgcaattatcgggcttggcaatcttcttattttgcatgaagttgacgcaggctcatcttctacagcaccaaagcctgctcttgctgatactggcaccggcaaggatacgccagctaagagcgatacaggcaagactactggcacaactgatggcaaggctactgatgatggcagcaagaccatcaatgtaccaaagatcacaccagttgcgccagtaactggtgtacctgacaaattggaacccaacgacgtattgaacggcgtattaagccgcaagactgatccttataccggtgctcaatacgttgaatacgcaacagcagacgcagttggcgcttactacgacaagactgatccaatttacatcaagtcagacaactacttcatgcaagaagcagcatctgaccgtattgccgtattgaattatccaaagggcaagcttgctgacgctttgaaggcattctggtattacaactgggccttcatgatctttgataagtcacaattcacagacaccaccccaagtgatgacgcaattattgcatctaacatctgcgaagctaacaaggatcacttcttagtattgcaagctactcaaccagccgcatacgtaaccttctatgcacaaaactacaccatcggcttgattcacgacttatcagaaccaatggatgcagctctcatcggtgcaaccgccaccttgacagttggcttagttacctggaagttcagaaagcttaagggcattactgctgaccaaatcactgttcaagaaaagtcagctatcgaccgtgttcacgctattgcttacatcgaagtaagcggacaaggcgaaacatcagaaggctgggtattgtctggtgattacatcgactcactccacggcgatctttgggtaaaaaccaatatgggcgacaagatccaaaagtacttgcaaaacaccgacaaggttccatatgaccaacgaggcattaatgcactcgccgccatttgtagccaagtcctccaacaagcctccgaacaaggaattgttttggaacaagaagtatacgactcaaacaccggtgaaactcaatcaactggcaagggggattactcagtaaccgccactccacgttcagctcaaagtcaaaaagacttatcagctcgtcactacggtggtttgagtttcagataccaccgttcaggtgctatccacaccgttctcgtacacggcactgttcaatctgatactttcactaattcaaaagcttaaaggaggagtaacacatggcaagttttaactcagccgaaaccggcttgatggcaaaatacaacgccaatgacaccactttaatggttgacggtgaattgatgtatggttttgcgacagataccatgatttccgttgcctacgacaacgacaatgttactgtcgcacaagacccacaaggcaccgctgttgcctcaatcaacaacaaaaccggtgccacattgactgtcaacttgaacgaaacttcaccaagcaacgccaagttgactgaattggctaacacacgtgcagaatttccactcgatttgagaacttcaacagttcaccaaaccgccacacactgctacatctcaaagatgccagacaacaccgcagcacaaaacgccggtaatcgtgcatggcaaattcacgcacttaaccttgatactgaatccttagtcggtcgttagtatcgagaatggctttcacgcttacaaaacagaaattaaaaattaaaggagaaaaactatgagcgaagaaattcaaaaccaaaacgtaaataacaaccaatcaaacgaagataaggctagccaaatggctactgaaagtaagaacttgcaagacatgatggctttgattgataagcaagaaaagtctagtgaaattgcttcacttactggtaagcctactttcttaactatcaataagggcaagaagaatgaatacactatcgaagtaatttttccaggtgtagcaaaagcttcaagcttacgtgatgacgcaagaactgctcttggtgccattgatcaaacctacttcatgaagaacgttgctattaaggaattgattgtacgtccaaagatttactccctcgattggtttgacaagcgtggaggctatgacgatgcttacaacaagatttttgattggtttcgatcaagcattaatggggaagcttacaccgaagaagattagtgatttggcttctgatcctgcaacgtggttaccacagcgtttggtaatgcacggtgttcccgaatcatggatcaatcatgcaacgctcgaccaattaagagtgatgtgggaagtagtcaaaaaagacttgaaatatcagacatatttaactgctaaagatcaagcacgaattatggcaaaaggcattgcgttggcatttggcggtgaggacagttagagcctaataaggcttttttattttgcacaagaaaggatgagatagatggcaggacgacatgttggtattgatatcggcgttagagttaataattcagtattcgattcagttgatagacatattgataaggttaaagccaatgcagaacaacttaatcgggtgttgtcacgtaccaagatgccggacagtgccaccaacggcttagacaagcttaatcgtgcatctggtgaaactagaactcagatcgaccgtttagccaatagttataagcaagttggatctaacaacaatctcaaccgtgcgcaaagtgatctgtctggtattgctgataaggctaagaaagctactgaatcaactgatcaattaaagcagtcaatgaaccgtgctcatgaatcatcaaaagcacttggtgatatgggtagcggttttgatcgtgctagaggatcatctgacagagctagagaaagctttgataagactaccagttcatcaaataagttaaagagtggctgggatcgcttgaaaggtgctggatcagcattggttcaagtcggttcatctattgctactgcgatggtgccagttgccgctgcattcatgaaagctaacagtgaagctaccaagttggctgatgaatacaacgtcatcaagaacttacaagaaacaggtggcgacagtgcaagaacagcgagaagaaatactcgtgatattcaagcagaaaaccgtcgtctgtctcttagatatggcgttgatcaaaacgaattggctagaggttctgagcaactgatcagacgtggttacagtggtcaacaagatttagccgctcacaagtacttcttgcaagccgctcgtgctactaacgaagattacaactcaatcgttaactcagccgcacctatgctggaacagtttggctataagtccagagctggtaacagtgtaagacgtatgtctaagtacacaagagatgttttgaacaaagccgcttacgttgctgacttaacttccggtgacgttggtggtgaaagtggttttggcgagtccttcaagatgatgggtagtgccgctcattcaaatggtcaaactatcgatactatgctgggtgcattgggtacgttatctaactacggcgaagaaggttcgagtgctggtactggtatgcgtcagatcatcactagattgatcaaagcgccacatagtactgcgatgctaggtgccttgcatgatttgggtattaatcctaatagcttgtacaccagaaatggtcacttgaaacagttaggaaccatctttgagatgctgaatcgtgcgtctcgtggtaagaaatctaatcgagtatcatccgacctgcaaactttatttggtcaaacaggtttcaatgatgctcagattttgatgaatcactacggtgacatgcaacacaatgtccgagaatctcaaaatgctgcacgtactggctatatttcaagactgtcaagaaagaatatgtcctcattgcagaaccagttagctagaactaagcaacttgctactgatatgggtatgagctttgcaaaggaagtcgcacctggtatcagcaaggctcttggctatgctaacaagctacttgaagctatgcgaggtatgccaaagccagttaaaactgctgctgcttatataacaggtattcttggcacattgggtgcgtccaagttagccagtggtttcttaaaagctaatttcggtatcggtaacggtaaaggaattggcgctggtataggtagactactgtttggcaaagaaaccggtgtacgtccacgagacccggttacaggtcaatacatcaaaggatcatttcgccagggtggcttaatcaatgcactgaaaggcaattcattcggtggcatgttcaagctcggcagagtccagcctggtgagctaacaggtaaagcactagttggcagacgattgcttggcggtgctgttggtgtcggaactgcattagatgttggctatcaagggttccaagcttacaaagatcgacacaatgcagctaagagatcagttgacattggtggtgctgtcggtacaggtgcaggtgccattgttggcggtatttttggtggccctattggtgctgcacttggtgcacaagccggtaagctctttggtcgaattggtggtagtgctgttaacagctttgtacatggctggcaacgcaaaaagccaccaaagaatttctggtcgcttgaaaatcttggctggtctactaaagacatgttcagcaagattggcagatggggtggtcaagtcggcaagagcatgggtagagcacttggcaaggctggttcatttgttaagaaaaacggcaaggaattagctctgactgctgttgctccgtgggctggtattcctgcacttttatacaagaacaattctaaattccgcaaatgggctaatggcgttggcaagactatccagaatggcttcaagggagctgttaaatgggtgaaggatctaccaggcaacattcataaaggctggaatcatgctgttaaagccagtcatgatttctttaagaacttgcctaaaaactttgataaagccaagaagaacattggcaaatggtcaagtcaaacaggcaagaatatctcaaaggtatggcaacgtggcaagaaagctacggtaacttttgtcaagggcattcctggcaacttagctagagccaataagagtgttcaaaattggggcagtcgtactggtcgcagtattcaaaagacttggaataaaggcgttactggcgtaaagaaattcgttggtggcattccaggtcagatgaatagagcgcacaagagcgtaagtaactgggctggtcgcactggtaacagtattcagtcagcttggaacaaaggcaaaaaaggtcttggcgagttcattacttcaattccaggtcaattaggtaaagcttacaaagcagtcaaggaatgggctggtaatgttggtagcactatttcaaaggcttggaataatttttggggcaaagctggcgacatccgcaaaggcatcactaataatctgaaaggttttggtaatgacctagatcgtgccgctggtcactctggtaaagccttcaagtatgagaagatcaaatctcatgcaactggtggctacattgaatcagctcatagagcattggtcggtgaagctggtcccgaattagcctacaagaatggtgcaaatgcacgtcttttaggggctaatggtcctgctattactaaggttcatcctggcgagcacattcttaacgctcgtgatactcgtaaagtcatggctggtggtttaggtcgtggcttaactctcaaaggttatgcaagtggcaacactaagctaggtcaaactactaagaccgtatcaaagggctataagaagattaattctgatgccactaagtctttgaagagtttgagcaagaacaatgcttcaagctggtcaaagattcgtagaacatcagccaagtcagttaacgctgttcaaagccataacaattcaacttggcgcaagattactagccaaactgctaagtacaacagcaaaacaagagccaacgccaccaaggaatacaccggaatgcgtaaatctgtggataaacagatggataacatgcacgatggtgtcatttctactgctaactcaactagcaaaggttttggtaaggctatgggcaagatgcgctcatatgctaaggacgcaatgggtgacaccattgatcaacttaaccgtggtatcaaaggtatcgacaaggtactctcacaatttggtggcaacggtagcgtcatcaagccagttcacttcgcacaaggttctgatgctaacggtcgcttgatgcaaaacactctttcagtcatcaacgatgctaagagcggtccacgtcaagaagcgttagtctcaccaaacgatgaattgtacctgcctcgtggaaatgatcttcatttggtgattcctcgtggctggggtgtcttgaatggcagacaaactcaacagatagctcaaagcaggggcttacagcactttgcaaagggatctggtgtaagtcatagccagttaagaaaaatcgcctcacatgcattggctgatcctgctaagagctttgcagatatgttcaccaagaacatcaaggaaagcggaccaattctgcaaaaaggaacggtcgatcttggtaagaacgcttcaactcactttggtaatccttggagtactgctatgtggactatcatcaataatgcgattggtgactctactggcaagggtggtactcgtgagcagttcctgaaatatgctgaatcaacattcagtggcgttccttatcaaatgggtgctgcaagcaaaaagctcagtgactgttccggtatggttatgcaggctctgcgcaaatttagcatcgatatcggtagaactactgtcgcaatgcaaaacagttccggtgttaagtaccttggtaagtcattgagcaacactatccctggcgacctggtcatcttcgggcatgggaccggagccgcagggcatgtcgggatcattaaggatcctagacgtggcaccatgtttaacgaaacgccaccaaaggctcgtgtaactcgtattgctgacgataaaggcatggggtatggctactacagagttaaaggcttacacaatgctgtaccaacacataaaacacaaaaagccgataagcggttgattgcacttgcaaaacaagaattaggtcatagtgctatcaagtggatcaaagatcatctaggtgatgactttggttctcttggtagtttttctattggcggtgatttacgtgatagagcaagagcattagccggtggcttgaagaagttagacccacgtgcaactaagaacggtattgccgctgttttaggtaactggaactttgaatcaggtggtttaaatccaggcgctgttaacagtggcggtggtgcttccggtttaggtcaatggctcggcggtcgtttgactaaccttaaagcatacgcacgtcgtcatggtacttcttggaagaatgctggtactcagttgtcatttgctgttaagggtgaaggctctgatagtgcaattttgagaagtgtcttggaaggtcatggatcagtagcaagcttggctaacaagtttagtgctgaatgggagcgtggtggttacaacgcacaacacgttcaaggtgctatgcaagttagaaaggctcttggttttgccaagggtggcaaccactatggttcaggtacttaccttgttggcgaaaatggtcctgaattaatcagcaccgacggcaaggctcacattgataaccatgatcaaaccaagaagaaacttggtgacttgttcgatgacttaaaagttaagaagatcaagccaatcaaagttcacagacctaactcaccaaagccagtaatcaatatcaacatcaatggtccaatttcttcaacacaagatgctcatagagtagcaaacattgtacgtcaagaaattgccaatgtatttgaaaacgctggcgatgagttcggtcttgatcaaactgtttactaggaggtgaggatatggcaaaacgcaaaaaaatgactgctgatgaaaaagcagacaagaaaataaagtattacaagtctttggaggacaagtatcaaaagagatacgctaaggcacaaggcgaagcgatacgcacgtatcagtctatgaatgctgccaaagacaaaaagaaacaaaagaaactgcaagcaaagtttaaaaagtgggacaagatagttgatgcacggtataaaccgtacagtcgttatcgcaaagctcgcaaagaagctgaaaaagaacgtcaacgcttgcaaaaaaagaaaagtgatcttgatgcgattgctgataaaattagacagcataatgctcaatttagtatcgacccatcaagtcaatacaatgaaggcaacgctgctatctatccgagtgatggtagccaagggcctatttttatttctccaagtgattcggaatcggaaggtatgacggctaatataactagctggccggttgatgagggcgcacctcgcgccgactacgctagaattgctggtaaaacggtcacagttggcggtatcattactggccacgaccgcgcggaagctaatgaaaagtacaaaaaacttaaaagctggatgaataatcacgtccagcttacttataaaggtgatatttactacaaacacttaatgatcagtgatttacaacaaagcttttctgatcttcgggacaacttgaaagtaagtatcacttttactttcgtgtactgggctgagattactacctcaaccggtaaaaatagcaagaagaagtcgtctaaaagctccaaacggacacaaggacacagaaataaaaagtacactgcaatcactattaagcaagggcagaccttgtggggcttgtctaagcgatacggtacgacagttaagtggctgcaaaaggtaaatcacatcaagaatccaaacaagatcaatacaggtcaacacctgtatgtgccaaagaaaaaaggcactacacgatcgaataaaaataagattcgggtgagataattggaaaattatgtaccagtcgacgttgataatctgccggacattttcgacattcaactagccggcgaggcctttactttccggagtgattataacagcatagcagattactacacctgcacgatcatgaaagatggcaaagtgctggtagcacaagagccacttctgttaggcaatctagttggtgaaatgattccaaacactggcttgccttggactgacttgcgtgtgcttgacccaaccggccacgccactgatgctggcaagggcaagtttggcgtttcggtacagatttatattgatgttaaagaccctaacggctcagaagatgaaaacccagatgccactccacttggatatgatccagatgaacaatctgatgatctgacagatagcgaggttgatgtctaatggctatcatcacaaaggatccgcacgcttggtttgtcacggaaagtgacgatggcgtacagactgtttataacaatgagactcttggtcatgactatcctttcgggtttcaagttaatttttccgacaccccatcaccacagaccaacacagtgacgctgtacaacctggcaaaagaacacaaggacttttaccaccgcaaacagcattgctacgtggcttttaactggggcaaagaaaaaaagattctggctgagggatttatctcaaagatcgacatgttccaacacgacggcgttactgatacgcaagttatcagttttaccgagggcacggattacagcaacgtcaaggctagaaaactaaagatctccaagaaaaagaaagtcaacaagtataagaccgtcaaggtcaaagaaaaagatcactataaaaacacctgggagcactggaccacggtcgagacatacaaaactggcaaaaagaaaggtcagaagtacgttaaacaccaccgtagatctaaagcagtgctggttaaaggcaagacgaagaacaagcgcgttaagtacagaggtactaagacggagcaggttaataaagtcttccgtaagggcactacgtacaaaaagatcattcaaggtatcgctagtcaatccggcatcaagatatccaagcttgatctggctaaaaacccagcaatcaagcgtcctttcactgctaaaggcaagccactcacactaattaagaacctactcaaaaatacaggctcaaagatgacttatgtgcgtggcaagctggaaatagttaatcctagagcgatgaaacgcacttggtatgtgattgatgataaggatttgattcagccaccgtcttacaatgaggacaactcagacgatgacgatggtaagggtacatgggagattacaataccgcttgtacccgaaatcacaactaacgtcggtattttgatgaagagtaagtatcttaaaggcaagttttatgtaaaagccggacagcacacgtcagacggtgaaaatccacagacgcaatgctctctggtatcaatgtaaggaggtcacagatggcttctccacataataaaaattctagctcacaagcagagctaaaaaaggcttggtatcacggattccacaaatttgagcatggaatctacgctggtatcaagtctttttatattgcaaaagttgttagctacgaccaaaaaaaacaccgtgcggatgtcctaccgctggccaactggtcagatgggactaaatcagcacagtatcttgatattccagttgtagagagctgctacatgtttgatgaaatggctgatgcactaaagccggaactttccaaggctgacagtgatcactcacttccagagcatagtcatacgcaatttactaaaagattgccaaagcgccgctttatgagagctggtgtgccggtcgtctgtgctgtcttggatagagataacgataactggggcggtagcacagatacatacactccgaacagtggacgtatgcacgacgctaacgacagtgtagtaatcggagtactaggagggtcgtggttaagtggctaaagatttgaaagtagatcaagacggtaacttagtcattgatccggacacacatgatctagcgatgattgatgggctggatgaaatagctcagcgcatcaaagcaacccttgagattagatacggtgaaatgatcaatcttgatccagaaatgggagctgactactcaaattttctaggcaagcatttcgacaaaagtgatgcagcagctgacatgacaagtgccattgaagctgatgtgccagaagtgcaggctgtcgactcaatccggttcatcaaaggaccacatcgaagtctaaaagttacattcgtggccaccgtcaaaaatgaagatggctcaacaagtacagtggaaggaggtttgccagttgccacttagtcaaagctgggggcttaccgaaaacggctttatagccccaacgtatgaagaagtcttggacagcgtagaagatgatttcattagcaagtttggcgatgatatcgtcctaacaagcaattctaactttggcatcattgccagactgattgcttggcgtgaaacactgatgatccaagaactacaacaaaattactatgcagcgtttatcagtacagcaactgataccagtttagaccgtgttggctcaaacatgggtgttggtcgtaaagttgcgcagccggcgtttgccacgatcgaggtaacgactgatgggcaatatctgattgaaaccggtgagacgtttgaaactgacgacggctatgtgtttgatttgatcaaagacatcacgacaacacagcagccggacggtacatggaaaggtactgggatcgttcaaagtgaagaaaacggctcgatgaacaacgtagctgctaacaaaattacgatggaatccaatccggacgataatgtgctgtcaattactaatccagagcctgctggcggtggtcaagattatgaagacgacgaaacatatcgagcacgattgctcgaagaaaacgccgctaaacctggtccaactgctttgggaatgacgtcggcactgatggagttgccaggcgtgcgtgacgttaatccagttgaaaatgataaggcagatgcagataaatggggtaatccaccgtattcagtacatatctatgtgctgggcggtgatgataacgagattgctcacacaatcgtaaaccatgaagcagcaggtatcacacttgttggctcaaaggctatcgatgtacaagatgctaccggtaacaagcggacagtacacttcgatcacgctatcgacaagccaatctatgtgaaagtcaaagtaaatgtcaacgaaaactggaacgatgacgaaggtgcagacgacattaagacagcagtggccgactatatcaatcatttgatcatcggtaaaactcttttcttaactcggttgtatccacttgtctacggtgttaatggcattgatgaagctactatcatgattggcactcatcaaggcacgctcggtggtaatgacatcgttaatgacatcaacgaagcagttagctgtgatacgaataacatcgaggtggatataaatggcgtatgaaacaactgatgaacttctagctgaaatatctgatcattgggtaaaagaccatcgaggtaacttatataagctgttcgatacgtacaatggcggattggaacagatcagtgacatggccaacaaagttgaaaagtggcgtgctatccaagatgcggaaggtgcgacacttgatctctttggccaagaccttagcacatcgagacctaccaaggaagatgatccatatagattcttactgcgtttaaaagttcttttgtcacgtgctcaaggcacaattccttcaatcgtcaaaattacaagtacagcattaggaactacacaagatatcaagatatggaataccgctgcaccacgtcatatcggtatccaactaccgtgggactatatcaacgatgtttatattcaacgtttcctggtagacaacttacaacacatgctagcgttgggctactggattgatgagatcgtgtttgtaactaccacaaagttgccgctttacgtgggtatgggtacgcaaatcaaacatcgcaaaatcgagcgatcgcccgttaagtggtggactggctggaaggctaggacaagcgacaagcaatatattgggatagctacacagttcaagcatcacaatactttgtcatcaaataccaaatggtggaccggctggaaagctgaaagcactagaagccaattcattggtgttgttggtcaactggctaaatcatcggtatgggcgacaaaagcagtgtggagcaagccacaaacagcagaaattcacgctggcttaactattgggaacaaaacattaactacaactactcaatcgattgcgactgagtagttttttaatacaaagaaaggagcaagaaatggcagaagatcctaatacgggctttaaagagaaattgaagcaaacgatcttgaccgatgccgggcgacatatcttcttatcggttggtaacggcgtaggcacattggtttatacacgcgctatcctatcaagtcaaaaacccgttaatagttccggacaagccttagatgatgaagcaattcgtcaaatcactagtttgccggacgatctcaaagaagggcaattaaccttaacgccagttacagatgatcactttgatgtaattgctgactttaacaacaagaatcaaccggcagacatcaattttagttgtattggttggtatgcaagagttgactcaaccaatgaacagaatcaaaaggtacaaggcgatgaagctttaatcgctatcacttttactactaacgatcacgagaccttagcagcaggtagcccagacggtttatctactgatgttatctctgcacaattgtctatgacaatcgcagaagccgctaatatcgatatgactgttaatgaagtgggatacgttactcgtgccgagcttaatgcatggcaaactaaagtaacggctgattttaacggcaagatcgaagacaacgaaaagaacacgactatcaccttacgaggtaaagaaccagtcaaggcggatggaaaccatacctttaacctgaatacctacacaaaagaagaaattgatcaaatggtcgctggtgctggtaaaggtgcagggattaatactgttcaaggtgttgcacctgataatactggtaacgttaaccttagtggtgtcttttatgcgaagactgaggtagatcaaaagctgcaagcccaacaaactaagattgacgaattgactaagactaacagcgacaaggacaatcaaatcgctagtctaaatcaacagatcacagggcaaaacaacatgtacaatgacttgttaaatcgtgttaagtttttggagcaaaatgcagttcttggcaagagattcgcagctagtcaagaagcagaagcagaagcttgggagaaccaacatcctaactacttggcaatgattgaaaagtaagggggaggtgattgaatgagtacaatcagagacccagcatatatcacagatgccgggcgaacgatgatgaccgctggtggtgatgtcacttacaccaaggcggtgttatacggtcaagacattagccacttaactagtgatcaagtcaaggcacttactacaattggtagtccacttagagaagtcaaagttggtattagcgacaagcaaaacactgatcgcggtacaaccgtaatccttgaagccacattccaaaacgacaatctagccaacgacttgccttatacggcggttggcttttttgcacagaaaggcaatgatgaaaagctgattgcggtagctgttgccaatactggcgcttatctaacagcgaccagtccagatggtattgctactgatgcacttgacttaaagctagcgattgcgattggtgacgctacgaatgtcacggcaacggttgacccagctggatcagttacaccagccactttaaatggtgctatcaacaaagctacacacgatctgacatcaaggattgacaccaaggcggataagatgaccgtagagagtgagttagctattaaggctaactctactgacattgataaaaaactcgctacgaaggctaattctagcgatgtgtacaccaaaaagcaggttgatgatgcttttagcagtcgtgatgctacgattgccaccaaagctgacaaggctacggttgacgcagagatcagcaagatcgacttcacgccgtacgctaagacggcagacgtgtccgaacagatcaaggctgttagcgatgaagtagccaccaaggtgggtgccgactactcatacagcaaggcacaactggacgaaaagcttttagccctatcgaccgacaccaatggcaaagtcaacgctacacaagcggcggacatgatcacgggcaaggctgacaaggcagacgttgacaaatcctttaaggcagtcaatgacagtttagcaaccaaagcggaccaagcaacgacttatagcaagactgatgtcgataagttgctaagcgccaaggacgacacgactgacgttgatgcaaagattaagactgttaccgatttagccaacactaaggcaagtcaagacagtcttaataagttgagccaaaccgttgataccaaggctgacaaggctacggtagacgcagaaatcggcaaaatcgactttaccccgtatgctaagacggttgatgtcgatagcaaagtcaagaccgtaaccgacttagccaataccaaggacagcaccgctgacgttgatgcaaaaatcaaggatgtaactgataaggttaacaccaaggctgaccagtcaaacgttaacaatcaagtgcaggatgcaaaaaatgccgctacatcaagggcggacaatttgcagagtcaagttaacaacttaaaaggtgcaagaaccgcaaattcgccagactttgatagtttgaccgattcaggtccttactatgtgacaaaccctgaaaaagggaaaaattccccttatgggggcatctggggtacgctgataatttctaatggcgctgatcatagaattgttcaaacttactaccctgataatgatgactctccattttatcgaatgaaggttgataataactggcaaccctggcgacagatggcaaaaatgatcgacatctctaatttaccaaatcagatcaacaccaaacacaacatagctacaccactgtttagagagattcaaaactcaaatagttggcaagatatttttggggttggtaatcctaataacgtcttgacttcattgagaattgatgcaggtggttccggtccattattgaatgactttgctgctggtgttggctttggtggcgcagatacgaaaggcgttctaagcgttggttatcataataatcaagctcgaatcactggcggtaatggcaacggaccagtttggagtgaagacatcgcttggaagtcggatattaatagcttacttaatacgattaccacattacaaaaccaagttaacgacttgattaatcaaatcaactacatcaaacaaaactacctgcaaggcaagcgattcccagcgaaccaagaagcacaagctgagcagtgggaaaacgcaaaccctaacggtattgcgatgattgaaaaatagatagatagaaagaggtgaaagcatgttagatcatctaatttttaatgtaaaaaagtggtttgaaatttcaaacgatatgtccgctattacagctaataataaaaactattatgcttgtccatcaagatttactgtcatggcagaaacaccgatcaaaaacccgaatacgggtaatggctggcgagtattaaatgatgctgaggttacctgtgttggggcaggccaagacgtttatttctttgatggacaacttgaaatttacgctgatagtgatgaaaacaagcatcctaataatgcagtttattcgcattactattacacgggcgtagttgaaaaaacaaatgttagaaatgtaatatggggggggtaaaagccttctacatactattgcgtcaatggttgagtatgctttcactctatttaagaaaggagcggaaacatgctagatcatatgctgtttaacaagcttccatggtttaacgtgaatcaaagcgacaatgaaattaaagccaatggcattcgctatgtagcattcccaccaacagtagaggttaaagaagattatagctttaatgaacaaactgaaagttgggacagttccaagattaaatggactgattccccctttgacatgcacacttataaaaaaggcgatgaagctcgttgcattggcgcagatgacgattactacgttgttgatgacctcccagactataattcttcaactggaagagcatacaaagcgatcattaaaaaagagctattcatagaaaactgggggggggtaaaacctcgccaagccgcttttggcaatggattaggtcacttctttgctcatgcaaggaggtggcttaaatgctagatcatatgctatttgatcgtaaaaaatggcgaagcctgacggacgaaaacggcaactttaatgctagttttctacctacatctggatatttgccatctgggtcagttttaattgatgataacggagctgttaaccctggcaaatctgttcaaagcattaattttcaaatcgttgggtatgacagaagaataaatgcatttatcacaaacaaatttgaaacgcaagacacttatagcttaggcgcgggaaatgagacttatggtttttattacagagtgctggtatcacaagctcgcaacttgaaatggtgggtaaccccccctaatccgcttatgtcaggcatttagagctatcactagaaaggtggtggttctatgatcgaaaagatgatcttcaataaaaatgattatcttatgttccctaaaaaggtcaaaattcccaaaggaacttcaacaagcaccgtttttacggattttccaaatactacttactctttactgaacgcagatttggagctggatgtatgtgcctcttcaaataccgcttatttagtcgggagaagtatagatttgccaattatccgtgaaggagatagtagcaccgtctatggtcctgtatgggttcgaaaatcggactgtacggaaatcttagggggggtaattagcccgttaatccacctataccaagtacttagagccgccaccagaaaggcggtggctgtatgctagatcacatgaagtttaataaagaagactactaccctacaacaaaaattattgtcggttatgtaaatacagaattaattggcagaacgataacttgcagtaaatataaagtaggatggtctagagatggaatcattgatgcttattataaatattctatcaatagtgattcgattcaatggaataaaccggatgaaataggcggcttagcttctacgggtgaaatcacaggcgttgtggtagatcaacataatattccatattatattgttgacgttgatcattggataaataatcctaatactggtgatgggatgtacacaccgcttatcaaagcatcggatatcatgactaagtatttatcaagggaacagttatagtattagtactcattgagtgctttttttatgcaaaaaattaaccttgctcacggggcgttcccgtgggctttttaatagaaaggagccaataaaatggctgatgaaaacacacaagttgcaccagtagcgggcgcagaagaaaacgctacacaagaaaacaaggggtttacctattactttagtgatcctgactctgtcaacgcagaaatgcatcacgtagtaattacgttgccttatgagttgccagaacttccatggcactggcacattgaaaagccagacgacagcttaaaagatcctgtctgggacttgaaggttaatggctgggtagaaaactccaaggacggtcaagccgcaatcttgcaagaagctacacaaaagattgaagaattggataagaagagcgcagaacttgataagaagaacgccgcacttgaccaagccaacgataagtttgaccaagcaatgaaggccatgcaacaaagccaacaagtccaaacacaacaatccttagcattgacccaaggcttgcaaaaggtcgcagaagggcaagaacaagccaacaaggttatggcttcaatgcaacaaattctggttggcatgcaagcagatcaagctaagactgctacaccaaccagtgacactaagccagcagaaaacactaacaagcaagaaaacggaggtaactaattatgactgatttaaacgctttatttttacaaatgtgggtacttgactatcaaatggggcttttccaaaagctttactttcaaggcttagttcaacaaggcttattggacgcagcaggttacaagaaagtcacaggtgaagactatgttgcaccgcaagctcaacctgcaccacaagcttagtcgctggaatttcatcaaaacagggctgttaatctcggcattggcggtctgctttctgatagatcgaacctactttttttacccaccaagtctagcacctgcgtggaataacgtctgggtcgatagtatcggcttgatggcaggactaattttgattttgtgcggtgtttttgatattcgggtacagttaatcatcaaagttggtctaggcgtgtcagtagcattcttgacagttctgctggttgcggaaagctttcacatcgttggagccggctatttcagattccaccctgctattgtttttgagatctacgcaatcattaaccttatgcagattgcttatgagtatgacccacaggactgagaaaggagctgatacacttgcaaggtcttaaagacgtacttagtgtactagctccattcctgttggggttgtttacttcatatctaagtgataagagaaatacgagacaagacagccatagctttttagtagacgactatgaggctgtagttaaagaaaataaggaattacgcagggaaaacgaaaaattgcgaaaggagttatccgaaaatgaaaccaaacactagaattttagactacaccactcttgtgcaagatggtgttttaaccttggacgatgtgccacaagacatcaaaggtgcagttaccaagtgggtgcgctatttgtcaggtatccaagacgaaaccatggtcaaggacccagacgcaaccaagccagcggtagaggataagccagtaggctacacccctgctaagacgggcgacatcactagcggcgtacttactactaagaaggtgacccaataatgaatctcactgaattaactgcttacacacaaatagttgttttggctatcgtggctatctgtatcggtatctctactagtatcgaatactttgccaaaaagtcggctaaaccacttccaaagcaagtaatgaccattgatgagattgctaagtttgtcgtaagcgaagccgcaacgctggatatttctggtgccgaaaagaaggtcaaggctgtacaagccttacttgatcaagccaagcaagaaaacaagccagtgaccgaaacagtcgccaagggtgctgtccaacatgcttatgaccaaatgacagcggaccaagccaaacaagaggatacacaagataccaacgcccaaccaattggctttgtatcaggtgacgacaatgatgacaagaactaagacgtataacgagtacgtttttgaatcgtttgacaaatcgtttgaaaaccaaacgaaaggcggtgaaaaagatgtcaagctcaatcgtatcaaagaaaagctatggtgtggacgtagccagcttccagaaagaaaacgttagctacacgggtgcgaaatttgctatcgtaaagcttacgcaaggtactggatacatcaacccgaaagcaaaagcgcaaattaaatctgcaaaggctcatggcttgctaaccatgggctatttctatgccaaccattccggctcggtcacacgagcacgggcagaagctaagtatgccgttgaaaaggctaaggcttacggagtcccagctggtagctacatcgctgacgactgggaagaaggttctggcaattcagtcaatggcggtgctagtgccaacaccgatgctgttcttgccgcaatgcaggtaatcaaagaagcaggatacaagccacttgtctattcaggtgctttcaatttacgaaatcatttgagcaccagccgaattgttaaatcattcggaacttgtctctgggtagcctcatataaggtcatgggtcgtcaagattcagctgattttaactatttcccatctatggacggcgtagcaatctggcagtttactgataactaccgtggtcttggcgttgatggcaatattaccctagtcgatttaaagatcagttcgggtaatcaatcaccaaaaaaggtaaacaagaccgtagaatcgccctctcagcatcccgtagtcaagtggaatattggcgctgttgccgtagtaagcaactcaaaaggtgcatatgtttataccagctcaaagctagacaagcgtgaaagtgacaagctaaaaccttgtggttctgtctggcaggtgctaggctttgaaaacggcgctgtcaaggttggcaagaaccaatacttcgatggtcgtgccgtctatgtcaagactaacccgatcgcatacaacgatgccaaacatggcgttgccaagatcgtgatgccacatactcacgccttagatgcaccaaaggcagacgctgggaaagtctacggcttggaacttaactcaaaagttgagattcaagggcgtgtcggcagattcctacgtatcaaagaaaagcacaatggcaagaccgtctacgtcacaggcaatcgtgcctacatcgtgctatagtaataatgattgaaatataaaaaggagtgtgaagaacactccaaatgccgcaagagccgctctgggagatttttcctggagcggctcttttttgtgttatggtataataaaaagagtagtggtattatccgcttgctctcctggttttacttcatgaactttttaataatccatgaagcaattacagtggctaaaatacttgaaaaagtagtagccataaaagctgttatggacatgaaagtaacactttctagactgtgataatttggaattggtggggttccacacagccatatatattttagcaaattttaaaatgagaacaaaatattggaacaatgttcatttttaatatataatagtggtggacatgaaaggatacactttcgtttaaagccccaaagctggttactttgggcatgtgtctagccgtctagtcggtgcttggctcttgctgatctgctgtcacaagagctttttttatgttcaaaataaatatattttagttaattttatttttttgttgcatttatcccgatatcgtgatattataataagtgaaaggaggtaaagatatgtcaaagaaaaaaggcaaaaagaaaaagcccactcgtgatgagacttccgaaaagatcgctaagtatgcgatgatcggagcttggagctatccagcctacgaacttatcaaacaactagggcgaatagttctaacacttgtcaaacacaagtaagctttaaagagggaagccgagaggctcctctctttgacatatctaattataccatgacacacaaacaaaaaatgcatcgttatttagcttggagtgtagttgctattctattaggattactaattaaaatgataggaagtgcattctagtgattaacttaaatagtccagatattatggaagcaaaagaagcagcaagaatctggggcgtatcagagagctatgttagaaagaccattagtcagtcacctcaaaagtttccagaaggaacagtgcgtaagtttggaaagcaatgggttgttaccactgagggtatggaacatgctactggtaaaaaagatcctagaaaagtgttataatcaaattgcctattgaaatataaaagaagaggggtgaaatactcctctaaatctatcaagaaagccaccttgggagaaatcccagggtggcttttttattttactcatgatataatttttaacatctcttctgagataacatcaaattttgaaccttttgatttatattgatgtttgctccacggttaatttcgtggggctttttttcttgtggtataatatatttatattactgcacgactattcattgcgaatacagaaaaagggaggaaccgagttggttcttcccatttctgtttttacgtaatttgcggaaaatttacggaaaaaagcttattactatttttgatttatgatgattcaacaaataaaaaaatgcgtgcttactgtctatgatgacctatgattatagtatcttaatttggtcatattatttctaatttgttagttcattctttgaaaatcagtcaagcaagcttgtttgctcaaggcagtgcaagcctattcttagcagataaggcaacagagtggctgaactatgagcatgaagaattcaagcgtttaaaccatttattagttaataacggggaaagtattccgactactagcaagcaatttcaggaatataccatgttggaagaagatggcagtagcaaatatcttgcaggtgaacaacaattattcaacttggtgaaggattttgatacgcagattttgtttattactaaggctattaccttagctaatgatgaaaattggccagagttagctgctaatttgattgatttgcttgcttggattaaggaacagattagagtaagtcaaagttttttaggccatgatctcaaagaaggattgtatactgaagaagacgatgatgacttttagttaaaggaatgagtttaatggctgatttatgcgttgatctggtaccattatttacggctttgccacaagatgaaaaaataaaactagaaagattggtgcaacatcaaaattatcaaaagggtgagatagttattgatccaactgtaagtgctaatttagtaattgtggcccatggcagtaccaagctatatacattagatgaaactggacatgaggatgtcttacaggtcttacatacaggggattatgttggtgaagactggctttttggtcaagttaatacgcatagttatgttgaagcaactgataatagtgaaatatgtttattaaggcgacaagattttttgaagttgatccatcagcagccagaattgagcattagattattagagttaagtatgacaaaaatttctgctatgcaaaagcaaattcaattgttaactttacctaaagttgaagagcgcttattcaaatatttgcaaatgtatgcaaatgaaattggtcaaaatagttttgttttaccgttaaaactgaaagatctagctttgtatcttggtacgaccccagaaactttgtcgcgtaagtttgctttactcgaagaacaaggcagattgagaaggaaattgcgtcagattgatctaatttaggatggcagaaatccatgaaaaaatcagaacgattgaatcaagaattaatttatttgagtgacaaaaaagtttttcatctaaaagaattagaagaacattttgctatttcggagcggacagccttgcgcgatattgcggatttggagcaattaggtctagctttttatactgaaagtgggcgcaatggcggctaccatttgactaatagtaaattgctgctgccaattcggtttaacacgcaagaaattaacgccatcttttttgcattgcaagcaattcgcgggatcagtgagacgccgtacagcaatgcgtatgatgaaattgaattgaaactggttaaaagcctaccgcagaatttacaagagcaggttaagttgcagaaacaattagtgcatttctatagccagccaagtttaaatgaggtaaagtttttcgcgactttgcttaaggcatgcattgataacagcttaattgaagtggaaaattttcagtttgtgcagggaaaacaaaaactgcagctgctcgatattttctttcaggcgggcaattggttctgtcatgcctataatttagacctgaaaaaatggtacgttttgcgtttagataaattcgaggcagttcgtgttttaccaactgaaactaaaataatgaataaagaaccattaactgccaacttgcaaaaatatgaagaaaattattatcaagtgccgtattcttgcttattaactgaaaatggcgagcaaaaggtgaagtataattcttacccgattatgaatattgtgcatgatgcagggaaaatttatctccaaggaaagtataatagagaagaattacactatttggttgattatctgatttcactaggcagcgacgtgcaggtattgcagccgagtgaattgaagaagaattatctcactaagttgaagcagattatgaaaaaatattaaataatgtcatggtttgtcgggattagcctttatattatatttacaaatttgagaggagataaaaattatggcaattatgacagaagaattcttagatgttttacgtgataagggactcgctacaatcgtttcgattaacggtaagccggctagtgtggtgaatacttggtcacagtatattaatgtagtggctgatgacacgattttgattccggctgcggggatgcactcaattcaaaatgatttgaaggcagatcctgagcacgctttgacaatcgcggttggttcttacaattatcctggcacaactggtatgggccgcggctatcacattcacggtagtggcaagttcatcactgaaggaacttattttgatcaaatgaaggcgcaattcgagtggattagagctgttttagttgtgaaaattagtgatattgaacaaaaaatttagagtataatgatggcatcgaggtgacagaaatggaaaacaagttttgtcataatgggatgaaatgccaagatggttgcccttgcgctggtaaagatggcatttgtcattgcccgatggccgatgagcaaaagtgtatgtgcaagagccactgcaaggaaaaagaagagaaatagataattaagtgtttaggaaaagaagctgattttctaggcacttttttgataatcaaataatttgctgtaatcactttcatcagctatgatatattttataaagtaagttatttttggtgaaaggggcaaatttatgaagtatccaaaaacaaaagaaattttaaatcaagctgtggctgacaccactcaattaatgatggttgtgcgccaacaacactggtatatgcgcggacctgaatttttgaaattgcacccatacttggacaaggtaatggacgagttggatgaacaacgtgatctgatctccgaaagattgatcacgattgatggttcaccatattcaagcttacaggaagtgcttgatcatactaagatcgaagctcatcctggcgaatggggaatttcaactagagaaagatttgcgactatcattgctggttatcgttatttggagcacctttatgaagaagggattaaggtaagtgacgaggaaggcgactatggctcaaatgatatcttaacgtcatgccatacagatattgaaaagagaatctggatgatgcaagcacagattggtgaagcaccaaaaattgatcgataaatgaaaaaacactgatagatcaaattgacctgtcagtgttttttagattaaattatgttctttgcaccagttggttgctaatttcttctcggcttgatatttatatttttcatagtcttctagaagatgattttgataaagtgtatttttgaattttcgaaaagcatgtcttccattaaaactatcaagtaacagattgcctagttgattattttcaagctggcagcagtaatcaaagattagtctattctcgtttaaatcttctttagacggaagagcaataaaacgcttgtcttcaaaatcattttgaaattcttaatacagcttgtacgagtctttttcccaattgggtagattctttaaagtggcatctgtgtcgtccagatagttgaagtcttctttattaaagtaataaacttgtttttgctttttgtcataaactggaaaaatttcaggattaaaatttttaattgcatcaattttatgtaattgataataatcattgtactgtattatatgtctattacaatactcttggctaaaagatgagactgtaaaatattttgtgtaaggatgaatgattccttaaatttatttctttaaacattagaaaaaggagttcctttctcgtatgattggtttgaacaaaaaacaacatacagaaagaggaactccttcatgaatgattttaccaaaaatattgctcaagctatattcgatcaagacaaaaaaataaaaacagtgaaaaaaatatgagtcctggatttaaaattgaagtgcaacactaagtgttaaacaaaaaggccatgaagacctaaacttgaattgacgaaaaatcaagaaaggaagatcttcatgaccaattcaaattctagcatttctaaacactatcatcaattaactagcgtacaacgtggtcagattcaggcaatgctggattctggtataacttcccgtactgtcatcgctcaagaagttggctgtcataaatcgacaatcagtcgcgaaatcaaacgcggaagcgtcctgcaaagagacagcagctatttgttgtatgagcactattacgctgatactgcacagatttattatgagaagcgtcgcaaaaactgctatcagcgcaattcattgaagcattatgctgtctttttaagaatgttctcaagacgcttcaaagctaaatttgatgccaccagcattgatgaattcgttggtgaattcaaaaggactatgccaggctatccttgtcctagcacgtctaccgtctatcgttatattgatcagggcttggtggacatgatctgcctatgaagctcaaaagacgcaggaacaagcgtcatcacagccatggcggtcacgctttgcacaagaatcagcctgctttaatgactttaactgaaagaaccacacgctttgaagtagttatcaagattcctgactatcgggcaagcacatgaaagacaagtcaaaagcttatgttcaacaggcaaccaatgccattaaccacaaatatcgccgaatcctccaatatcagacagcagaagaactcttcaagcaatatatctcttcataacctaactgttgcacttaatttgacaattcaggaagaattaattatcatatttcccgcaaaaaagttgttgtgcaaaattatcctatcaaagaaacgggagctacctacttgctaaagccatatgagctactagtagaagaaacttataattagacctttgagtcaccaagcgtattagtgcttcggtggctttttacttgtgtgtcgggcatgacatttcatctaatccaatgaaagtttggaccacgggtatttgtcgccaagtgtagtgaaccacaagccgatagcggtgacgctatgggtgaaggaagtggctagcgagttttccgagcctacgtacagaaacctggttaggccaaatggcggataaggctgcgatacaagtcgaagtccaaaagacaaacgtaaagtcaagacggtaaaccaggaggcagtggaaaatcaaagatgaatgtcttaccccgagagatcttgcggacaggcaagctgagcaagctttaacatcagcgatcgtaagcctggtcgaaaaaggttagtcgcaagaagtcagctgaggtcatagtagtgttgaaagtcttgtaatgagactggagcgaaggacctaatgtttgtaagagcatatcccgctataagcaatgttcagatagtccgaataagaggatagcctagcacaaagagaacgtaactctttgatggtgaaagcaattgggatgattctgaataaatttacaagtagaaatggagatattacgagatgaaattaattgaacagattctaagtcagagcaatcttaaagaagcgattcatagagtcaagattaataaaggtgctccgggagtagataaaagaatggttgaagaacttgatagctatttcagaaagcatcaagcagaaattaaatacgcaatcatgaagatgatggatatcaatgggtaattgatttagatattgagaaatattttgacacggtcaatcatgataaattaatttcaataattagagaacgagtaaatgacaaaaccaccctccatttgattcggtcattcttaaaatccggtatcatggaagatggtttggttaagcccaataagattggcgtgcctcaaggcggaccgctttcgccaatcctgtccaagctttataacaagattagagagcttctttgtcgcaggaaagcagctgctcaacctctatcgttagtctttactaaggtaaatcaagtggtcagaggttggattaactactttaaaattggcggtatgaaatactttctatttaaattcagtcaatggctgcgccataagatacgggtagtaatcattaaacaatggaaactgccaagaagaatatacactaatttaatgcggattaacaaggcattaaagtgcaattttagcgacgaagatattcataaagtagctaatacgcgattaggttggtataaacgcagtaccggacatgttgttaactttttgcttagcccaaaagtattgggcataagcaaagcggatcgcccaggcttggtcgatccgctagaatactatttatctcgtagatgattacaaacgtagcgccggatacggaaccgtacgtccggtgcaatgagaggggcgagaattaatctccctctactctattactttatttgtttatttagcgaaatcatttctaatagactctgagcagtagaggaaccttcattgccagcttttaagccggatcgttgcaaggcttgatcaatattctcagtggttaaaataccaaaagttattgggacttctgctttaagattcatctgcataattgcgtttgtaacattctgaataatcatgctgtaatgatcagtctcacctttaatgacagcgcctaaagtcataataccatcgtagttatttgaattgagaagcttattagcagtaaaaccaatttcaaaagcacctgggacccaatagatatcgatctgatcttcaagtactccaaattgctttaaagtagcaatagcaccgtcaactaaatgatgggtaacggtttcgttaaacttggatgctacaattgcaacgtgataattattgtttttaaaatttccttcataaatattcatttctgtgttcctcactatagtgcttctaataaatgatggaatttatctcgtttagtttctaaatagtcatgatttaccttattagcaggaatttccaagggaattcttttttcaatagtaataccgttattttctagttgatcaattttatcaggattattagtaagcaaattgatatgactaatacctagatcttttaaaatcttggcagcaataatataatttcgttcatctggcttaaaacctaaaatttcatttgcttcataagtgtcataaccttggtcctgtaaaccataagcttttaatttgttaattaatccaattccacgtccttcttgtcgtaaataaagaattatgccactaccatttttattcatttgcttcatggcagtatgtaattgatcaccgcaatcgcagcgcattgagccaaacgtatcaccagtaaggcattctgaatgaagacgtactaaaactggctttttaggatcaatctttcctttaataatagctaagttttcattggcgaaagccttaattttgaaattgccatatttagtgggaaaatttacaaactctgagcgtttactcacaggactattaatatattcttgtagttctgcaattgttaaaaatggtaagtgatattctttagcaatttctttcagttggggacgacgagccatatggccatcagctttcataacttcacaaatatatgcaacttctggttcgccagcaagatgagctaaggcaatagaagcttctgtgtgaccattacgattcttgatttgatcatctttagcgactaatggaaaacagtgacctggtctaaagaagtcttctggcttggaagtaggatcagcaattgccttgatagttgccgcacgatcataagcagaaataccagtagtggtggttttgtaatcaacactgattgtaaaagctgtaccatatggatcagtattattttgttccatttggtagaaatttaaacgttgggcaattgttttgcttacaggggtgcaaagtaagccacgagcatgtttggtcataaagttaacattttcaggagtaactttagaccctaagccgatcatatcaccttcagattcacgatcttcatcatcagcaacaatcactaaaccaccatttttcatccattgaattgcattttgaattttttttacgtccattttaaattctcttttctaaatttttagcgacatatttacttaagatatcagtctcaatatttacttctgagccgacatttaacttacttaaatttgtttcatcttgtgtatgaggaattaatccaactgagaaaacattatcatgtgtatccattactgttagcgatacgccattaattgcaatactaccttgtgctacaatctgattttttaagcgagtaggaaaggcaaaccaaacttcaatagcattttcgttagtcctgatttccgtaactttggcaatatcatcaatatgtccagtaactagatgaccttctaatctttgtccgacctgtagtgaacgttcaacatttaattgggcattgatatccaaattcttaaaagtagttttctgataagtttgtggcatcatcgttactacaaaagaagtatcagtgtattgctcaacagttaaacaggttccattaactgcaattgaatcgccaatttgcaagtttttagtaaagtcgggctggcaagcaacagtcataacaatagtttcatcgtttttatcaatagcagcaattcgtgcgtcgccgcgtactagaccactaaacattaatttcaccttcaattctaaaattatcatccaacttttcagcacgtaaattatgtaaagttgttttggagctgggtgaaattcctagctttcctttttgaccaagtaaaattggacttatgtaagtaattaaattgtttacttgaccttcggctagcaaggcattagctagggtaggaccaccttcaacataaaccgactggatctcttcattggtcagtttttttatgacttcggtgattgaagcgtttttcatcaaaaaaattgagatattttcattatgtggagtcttagctaagcttgtattttgagtaaaaatccaagttggacttaacttatccgttaataacttaatatttaaatgattcagtaatctaccacgtcgatctactattattcgaatgggtggaaaatccgtagtgacagtagtcagtaaactaggattatcgataatggcagtatttgatccaatcatgatggcttgataatttgcgcgctctctatgtactcgctgataaacagtttcatttgttatttgagtgcgaatatttttagcctcattaattcgataatctaagctgaccgcctgtttcaacgttatccatggatgattatgttggtagaagtaagtataaaacttgtttagcttctttgcttgatcttctaatacgccaaccgttacttgaatattgtgttgccttaacttggcaatacctttacccgttactagttgatgtggatctacttgcgcaattaccactcgtttaattttgctagagacaattaaatcagagcagggtggctgcttaccataatgactgcatggttctagagtaacgtatagggttgaattaaataattgttctggagttagttttgaaatagcatcacgctcagcatgataataaccataacgaatatgatgacctgtagccaagatattgccatctttaacgatgacagctccaaccatggggttcttccatgtttgatagagtccttttttcgcttcttggatagctaattgcatatatgcttcatcactgttttccatttctttcacttcctaacagaacaaaaaaagaacctcgaagaattacctcgaggttctaactaacattcaaaaaataatttaagtacagttcctactatcaaaatagaaaagagcacagcaaaattattcttcttccatctagactctaactatcggtaccattaaaggattcaaccgcttatgcgggttgcggactttaccgccggtcgggaatttcaccctgcctcgaagaacattatttaattcattcttagaataaaaccgctttctaaatttgtcaataacttttttaattagaaaaattccaaaggtgataaaatacgctaaatctttttgaaattccttttagtgattattgagggttctataataaaatgaattaacaaaagcaactaatgaacacgagagtgataaaatgaataccaacaaattaactgaattacttaataagatgaatgagtatcgtcccttagatcaagcacaggtaaaggctctagaacaagtcaaaaaagagacaaatttataggatacgcgtggtgctagttaaatcgttttagttaataaaaaagtccaattagactagactcaagttgtaagtaatttaaatagaaaagagtctgatctaattgaactatctcaagcttaatcgtttttctcaccatttacaagttagttttaatcggttaaatgtgatttgtcgctcgctgtataagctttatgcgcctgatggacttaaacatcgtaaaaatgttgatcagaccaagcttcctaatagttctatcttagcgatgctcatttggcaaactgaaattggaattgaatctcaacgaagattctgtaaattcttcgttggcttatctcattctcgttttaaccgtcgagctcgaatgctcttgcctctaattcgttgtatccgtcaggcttggaatcaagaagtaaagacagctggagaatttttgattattgatagtttcccagtgccagtttgccagcctgttcgcaattatcgtgtcaagatctttcggggcgtagctgatattggttataaagcaaccaagaaagtctattattatggcttcaaggtccacgcaatagtaagcgatgatggctatctgcttgactatgcagttactaaagcgtcagtacatgatgccaaagagacagtagaattgatgatcaatgctcatccagccaaccattatcttttaggagatgaaggttatttaagcaaaaatctagctactaatctaaagcacatgggatatgtgctttggacgccatatcgtaaaaatatgcaaggagctagaaggcataatgatcatcaattgatggcaattagaagaagcattgaaagcgacttttctttgcttagttattacaacgctgagaataatcgagcaagaagtccagtaggctttcaacagcggctagaaatagctattttagcttataatatggcatattgtctagaacgatttaactagcaccacgcgtataggatatttattgaaaaatcaatttaattagaaaaaactctaaaatgaagaaaatttcatttgatctacattaaatcttggtttttaaaggttccttttttcgtaaactaagtgtacaaagttaattaatacgaaaagcgaggaattcaattatgaaaaagtttaacattaaaaaagtatcattggcagcagctgcattaggcttagcagcgggtggcgcaagtttattggcgattaaccaggctaatgcttctactggcactcaaacgcaacagagtcaaagcaataacacagaacaaaatcaaagtaatacaggtactgcaagtattaatctttctcaagaagatgcagttaataagttttatgaaaagtatggctcaaaatcaattaaggagattgaactagagcaaaagaagaattcatatgtgtatgaaattgaaggttttgattcacaaaatgaatacaaagttaagattgatgcaagtaatggcaatattttaaaagctgaatctgaaaaattagattcagatgatgaggcgcaagcattagatcttaataatatgatgactcgagagcaagctactcaattggctcaaactcaggtatcaggtcaacctgttgaatggtcattagaaatggatgatgatcagccaatctggaaagtagaatttgaagatggaggtaagaaaaccgaagttgaaattgatgctaaaaatcagaagattataaagactgagactgaagatgatgaaaaagatcatgacaaggattatgaaaaagaaaaaatgacagtcaagagcaccaaaatactgatgaagattaataagtaactaatagttagaaccgtttgttttaagcaagcggttctttttcataaatgaaattactatacgttttttgaatagtagcatttaatattagtaattttatagacagtctgttttgattagactatgtatataaagtaaacgatagtaaggagaaataatatgaaagcagcagtttttgtagaaccaggtaaagttgaagtaagagaagttccaaagccaaaaatcgatggtgaaaatcaagcaattattcgtgttatacgtgcaagtgtttgtggttcagacttatggtggtttagaggaattgctgatcgtgaaagtgggtctttaattggccatgaggcaattggtgtcgttgaagaagttagtgatgaggtaactaatattaaaccaaatgattttgttctcgtaccatttactcatgaaactgtcaaatcttttgtgtaaatagttctttctcgtaaattgattttttaatcatttatttaatcaaaataggattctaaggtatcctgaacctgaccaaagcctttatgaattcggttgaaatagcggtcattgtagctcattgcctggatgccaataaatgcatcaagcgactgttcagttggaaattctgccttaggcttagctttacgcttgatgacgttgttaaaggattcaatcatattggttgaataaattgaagctctgatttgtttgggataattgtagaagaccagcagatcgggctcaatttccttcaaacctttgatgacatggctataagctttattccatttggcatagaatttgtgcaagacagctgcagcttcttttttgcttgtctgttgatgtatctgcttgaattcgttcatgatcttttcgcggtcatccacccggactttagcacagatattgcgcatgacatgaaccaggcagcgttgaaaatgagctttaggataagtcctggccaaggctgttttcatgccaacaacaccatcagaaagaaagagttcaacttgcttcaagcctctggacttcatgttttgaagcatctctgtccagacttcaatgttctcgctaggagcaatgcagtagtcaatgacctccttgtgcccattaggcttgatgccaatggcaatatagactgcttcacgctcaaacgtttctcggcgcaaaggaaggtatgtcgcatccaaatagacgcagaaaaacttgtcgcttagcttgcgcttgtgataagcctcaaccttggggagcatctgcttggaaatatttgatacttgagctggactataatgactgccatacattttctcaatcaagtcagcgatttctctggtggttacgcctttggagtagagcttgataatcgtgctttccaaaacatcagagtgctgcttgtagtcaggcagcgtgtgctgatgaaactgaccgttgcggtctcgaggcacttgcacttcaattgggccaaattgcgtatcaactttgcggaaataagcaccatttctagaattgccagtattccagccatttctggcatagggatcatagcctagaaaggcagtcaactcagcttctagcaagttattaacagcctgttgtagctctttgcgcaataaatcatttattttgtctggattgaatagagcttgagcaaaatctttggtaaaatcattcatgaaggagttcttctttctgtatgtgtttttttgttcaaaccaatcatacgagaaaggaactcctttttctaatgtttaaagaaataaatttaaggaatcattcatccttacacaaactattttacagtctcttactcatggatatggtcattgtgttgcatgtattaatggttttgaaggcaattgcttgaatttgaagccgggtactaacggtggctatcaagccgaatttatgaaatatgaaccagcaaactctggattagttaagattcccggtaagccaggagattatactgatgatcaattggcatcccttcaaacattgtcagatgttatggcaactggttaccacgcagcattaaacgctgaagttaagaagggcgatactgttgcagttatcggtgatggtgccgttggtcttgccggtgttattggtgctaagttgttgggcgctgaaaaaatcattcttttatcccaccacgatgatcgtgcacaattaggaaaagaatttggtgcaactgacattgtttcaagtcgtgatgatcaagcagttaaagatgtactggctttaactaaggaaaatgctggtgctgatgcattcttagagtgtgtaggtgctgaaagtgcaattgaacaagctggtcaaattgctcgtccaggtgcggtaatcggtagagtaggtgtaccacatgcagagcctaagtcaaaccaattattctggaaaaatgtcggtcttcgcggtggtattgcttcagtaactaagcctgataaagaagttcttttacaagctgttcttgatggaaaaattaacccaggaaaagtatttactaagagttttgatttagatcatatccaagaagcatacgaagcaatgagcaatcgtgaagcaattaagtcattgattatcgtgaacgaaaaataaataatcgcgcaaagcgtgcgtaaaaacggtcgaaaatctaagtgtataattttttacggtaagttgaataaataattaaaaaagcccaagtcctttgaatttggacttgagctcaaacaaaaagaccagtagtctgatgttaagaacaaaaaacacattagaagctggtcttttatgaattcaattgtaactgaaatcgcaaatattataaagtctgaagataattatattaagcgtgaaagaaaaataatctgtttcttcttaaacctgattaaggaaatcatggccttggctttagctaaagttgatgatgaaatgattaccaaggttaaagcacagggctatcagattgataagaagaatgagcgctcaatcaatatggcttttggcgaagttaggtatgtcagaagaagatatgtctgcccaggcaaacaagcaaggtatcccttggatgaattaatgggctttgacaaatacaagcgctacagtattttagcagtcaaaaacatcttagaagtaagcagcgttgccacttatcgcaatactgctctagcagtcaattgcctgtctggctttaatattagccatatgcaggtgggcaatttggtaaaaatggccgggaaaaatattaaagcgggccaagaagcagattcaagatatgatgccgcaggcactaagaaaaaggtcccagttttgtatcttgaaggcgatggcgtggtgatcaaaggcactaaaagccggttggaatttcatcgctatcaggtctgtgaaggcattgtcaatataagcaagaaacgcagaaagcgaatcaatgccaaggaatttgtttctttaagccgacttgatgcgctgaacgaagccaaggagtacctggccaatacttatgatctttctgatactgtaattcttagcaacgccgatggcggtgctggatatgccaaaacagacttcgatgacattgtagggctatgcaagcgtcatgagcatttcttggatgtctttcacctaaataagaaaatcaaagaaaggctatattttgcgcctgacctgcaaggcaagctgatttctgctttggaatacaaatacagctatgacaaagttaaaactatcctaaccactgcagaaagccgactaattgatgaattgaataccgagctcaatcatgattatctggggcgcctaaggaattatattgatcgtcattgggacgatattaagccgtttaagaaacgaaaactgactgtgactaaagccattggctgctgcgagagcaaccaccgcaagtatacctaccgtgttaaggggcaaggcaagaaatggtcaaaatctggagcagaaggcatgcttaggatcttaagctgcatcaagaatcgagagctggaattttggcttagcagcgagtttgaagattcagaaataactgtattgactgaacaggaattaaaagcagcggcccgtgacagcttaaagaagcgtcatgaagttcatttaggcatccagcatggcgcattaaccgcacaggtagctggcaatagttatttaagcaagctaagcagaaatttaagtcatataaatatttaagaaattaaggttagactaatggtttaaaggctaccgcaaaaacattgacacttacgtcgaaaataaaatcgaccgtttttttgcgtgcgaaagagtataattgtagataaaatagattggcaaggtgacttaagtgagagaaacaaagaatttagaatttaaagagaatcttacaaacacatttttaaaaacggttagtgcgtatgcaaattatggtacaggagaagttaaatttggtataaaggatgatggaacaattattggtgtaaaaaatccaattgatttttgtttaaatgtagagaataaaataaatgattccatccagccacatccagattataatttagagattgatgataaaactaatgtagtcacgttgacggtaaaacagggcgataatccaccatatttatataaagcaaaagcttataaaagaaatgatagtgcttcaattgaagtggatagaacagaattatcacaactaattttgattggcgaaaataagacttatgacagtttaacagctgcaaatcaaaatctatcgtttaatattttagaaatggcactaaaagaaaaactaggaattaataaattgacatccgatgtgctaattactcttaatctagaacagaagaatgccggatatactaatgcgggtgaattattagcagataaaaatcattatcgtgggattgatgtcgttcgctttggtgaaaatattaatattatgctggatagggcaaactatgagaatgaatcaattcttaaagagtatgaccaaactattcaaaaatatcggcagtattatcagcgtgaggaaatacatggtgttactcgtaacgttataagtcaaattcctgaagaagcttttcgtgaagcaatagctaatgccttggttcataggacttggaatattaatgctcaaattaaagtttctatgtttgataatcgaatagaagtagtttctccaggaggattacctcataacttgagtaaagatgagtatctgtcaggtcaaatttctattttaagaaatcctattgtggctaatgtcttttttagattgggtttaattgaacaatttggtacaggaataaagagaattaaagattcctatcaaggaagtttagttcaaccacagttcgagatctttgaaaattcaataaaaataattttaccaattctaaaatttattactgatgatttaagcgatgatgaaaagaaagtatttagaaccattcgcgagggtgcaaatacttctacacaaattagtcgagcaagtaattttggtaaaacaaaagttttaaatctacttaaacaactaacaaagcaaggttatgttgagagaattggtgagggtagatctacaaaatatgttttaaataaataatcgcgcgcaaaacgtgcgtaaaaatggtcgaaaagcaaatcgaccgtttttttattgcttagttaaaatctcgtaactccaattaatcagtttgttattataagcaattgctatatttttatctcctgatttgattaatttaattaattttagattctcttcagaaatagaattaacatcgacttcattacagatccattcacctaaagttaaatagattgatttaaagttattgataagcaaaggataaacataattcttggaggccaaggctaaactatgtacataagcaaatatttcttgtgcagcgtccttggaattggtggctttggcaagattttgcatatttgaaatagctgattgcaggcattgttcatcctgttctatacaatctaagcgaacaacatcattttcaattagtttcctgatttcaaaaatcgaatttaaaagtgaaattcggtaatgtcccccgtagaaattaataatttcgttcattgtttgcaaatcgccatcgacacgataatctgctacaaaagccccatatctaggacgaatttctataaaatgtaatgccgctaatttttttaatccggaattgatcacagttcgacttacttgaagttgttcttgtaaaactctttcactgggtaatttatcgccgaggttaaactttcctgttaagattgctgtttttaattgattaacgaagaataaatctgttgcagtgggtacatttattgggtgaaatttcatattattctcctttgcactggtaggaccagaagccaacggctagtttatataaaataactttgtttttctttactttgatcctttttttaattcatattaattataatgaaaacgtaatcatttgaaaacgaaagggttaaaaaatggctgaaaaatatgatgttatcgtagttggggctggcaatggcggcttaatggccgccgcaagttctgctagaatgggcaaaaaaactctattgattgaaagacataatctggctggtggagcagcaaccagttttattcgcggcagatttgagtttgaagtagccttgcatgaattatgtgaatatggtcatgctgataatccgcgtgcagtacgaaaaatgtatgactggttaggtgccaacgtaaaaatgcaagaattaccagatacttatcgctatattatttatggtaaagacggatttgatgttaagatgccagctggtagagaaaattttattaatgcgatggaaaaatatgtaccaggtacttcagaaaagatggaaaagctttttgatctgtgtgagcaaagtatgaatgcgttagcagaaatagcagatggaaaggataaaaaagaagttataaaaaaatatccagcttttatcgagtatgctactaagagttgggatgatgtgcttaacaaattaaaacttcctaaaaaagctcaacaaattcttggagcatattggtgttacattgatattcccactgatgaatttgaatttccgtattttgccactatgttagctacttatgtagaaaacgatgcctatattcctcaaagaagaagtcatgatatgtcaacagcattggcacaagtaatttatgataatggtggtgatgtttggctgagtacaactgtagaaaaaatcttagttgaaaatggtcaagctgttggtgtgcaaattaaaggtgaaaaagtttttgctaaggaagttatttgtggaattactcctcacgcagtttatggcaacatgatggatcaaaagtgtattcctgagtatgctttaaaatatgcaaactcacataaattaggaaccagtgcctttttggtgtatcttgggctaaataaatcctgtcgagaacttggaataaatgactatagtgtgttcattgcttcaacaggtgatactagaaaacaatatgaaaattgtaaaactatggataaaaatgattttatgatcatgaattgcttaaatactgtcattccaaatgcttctcctaagggaactagtgtttgctacattactaaattagttgatgatggtgtttgggataatgttaaacccaaagattatgaaaaacttaaagttaaaatagctaaaaatgctattgatgagtatgaacaggcaacaggtattaaaattagtgattctatagaagagattgcaattgctgcaccaccaacatttgctcgctatatgggaacacctgatggtgaaatttatggctatcattgtgcaccatgggatcaaattattggtagatcaatggatttaaagaacgttgtaaatccactgccacatttatatttctgcggtggtcatggatttatgtgtgatggttacaatgtttcatacactactggtttaactgcagcaaaaatagctgttagtgatattaataatatgggagcagatcatgaataaatttgaagagattaagggaattattgatttaaagaagcttcaaaatgagcgaaaacatgaaattcaaaatgcttcggatgcagagttgcctaaaaaatatccgatgaacattcttgaagaggagcttcatcctgaaacgcaatatttgaaaatcactaagattattgaccgtgacgatgctaagagctttgtatttgtaccagatgaatcaaaaggtaccagcaaacttgcatatttccaagcaggtcaatatatttctttaaaacttcatattggtaaaagttattgtacacgtgcttatgccatttcaagcacacctaagcaggcgctttctggcgaatatatgctcacaattaagttagtcaaaaatgggtatgtaactccttatatttgggagaattggaaggttggcactgaagtagctgcttcgggtcctgctggtcaattattctatgaaccattaagagacaagaagaccattattgctggtggcagcggtattacaccattttactcaatggctggtgcaattgctgatggcacaattgatgcaaatttgattattttatatggaagtagaacgcacaaccatattttgttgggtgatgaattagatagaattgctgccaaaactgataaggtcaaggtcgttaacatattaagtgatgaagaagtagtcatgtggtaataagtcaatgtaaaagttaaattttatttttaattagtttgttttaaaaccaaaatttgcgtgcatgaaactaagccctatttcaagggattttttaacaactattatttactcctccaaaaatgttttagaccaattaatcacctcggtgtttgatagatttgaccatttttgagcagagtgaaaatggtcctggttaattttcttgcacaaagaacgcaagcgcgtttatgcggagaatagaaagcttcatcgtatttcttttgatagtacttccgaaaaacgggatctctttgtctaatcaggttggcagcttcaaccaaataatatcttagataatgatttccgtttttagtcatcggtttgtgttcgctatcaaaattactagattgcttttgacgccaagctagaccagcgtatttagctagctgtgcttcagtgtcaaagcgatcaatactgccgatttcagcgataataccagcggaataaactgacccaattcctggaatagattgtagtattctctcttcaggaagcgtttggacgatatctgtaattgctttatctaagttcttaatcaatttctgattagttttaatttcggcatagtaaacagataatacggcatcaatcgagtctttcatgactttacctaagcgatatgatcctctaacggcttttctgatcgctttagctaaagtctctggatcagagaagcggccacgtccttgggtttgaaggtagtcaattagatcctcgattggcatttcagcgatttcatcgatggttttactatcagtaacaattgacagcatcgttgcgccaaagatagaagttttaatattgtctttgtcaacggtaactagtttgtttacacgataataaagagtttcaatgaagtgctgcttagctctagtgagcgaagatgtgatttcatatctagctctagttaaacgctgtaaagctaagtattcctcttgccgagcaatagtgacatggtatttaccaaagcgtaagtattcagcgatgtaataggcatcagtaggatcattcttattttcttcgtaaacgtcatgaaatcgtttagtgtttttaggattaatgacatcagtttcaagattaattttttgtaaatcttcgtcattggcaaagaaataagcagggtgaaagctatagattgaagtggcttccatgccgataattactttgtcatagctgttctgtttagcaagttgaagaattatctttttgacctcattagcaccaatcaggtcattagaaaaagattggttaagtaaaggtttttgataattttctgagtcagtaatagcgacttgaagatcttttgaactaacgtcaattccgataaaaagtttcattgagaatggcctcctttctagcaaatatttggtcatagatcgatcatcacatgttagtccctaattacagattctaagacaatctcgcaaaatataagtattcataggttcaagctaaaaagctgcgactgaatctgctctgaatcagtaatagccagaatcgatacagcatgtgagtaagtcattagtaaaactgcttgggcggcagactaaaaaagtagtcaaagctacagaaggaaacaacctataccaattgaccaaggtcaatgacaattagagactagcatctgatgatcgaataaacaaactaaaagaataatcattatcactgatttaatttatataatacgagaaggatatgaacatggctttatcaatcaggccatcattgaaaaatatgctccagcagataagaattattctatttatatgagtggtccagctgcgatgattcattttgtaaatcaagaaattaaaaagttagatcttcgtccagggcaagtaagacaagaaatgtccggttcagtaaatccatactttttcaagaattatcctgaggaagcaaagaataagactttcaacatgacagttaaaacccgtgatcaaatacaagttattccagcaagaagtgatgaaagtttgctggtggcaatggaaagagcaggtattattgccccttcatcatgtcgctcaggcgtttgtggtgcatgtcgttcaagagtagttaatggaaaagtatttattccatttcctggacgtcgtgcagccgatagtgaatacaactatgtcaacacttgtgttacatttccaatttctgatttaacacttcaagtgccagttcatgactacgcaaacatgttaggttaaaagtcaagactgaaaataaaattttttttgcgttatattatctatatgttgtatttgatagttaagcagcaataccaaatgtagaaaaagaggatttaaatggcaactttagagatcaaggatttacatgtagaagttgaagacaaagataaaaaaacgagtaaaaagattcttaaaggcgtgaacctaactctcaagacaggtgaaattcatgcaattatgggacctaatggaacaggaaaatcaactttatctgagactatcatggggaatcctcgctatcacataacgcaaggcgatattttgctaaacggtgaaagcattattaacatgccagttgatgaacgcgctagaaaaggattatttttagctatgcagtatccagcagaagttcctggcgtgactaatgctgaatttttgcgggtagcaattaatgctcgccgaccaaaagatgatccgatttcagtgatgacttttttgaatgaattagataaaaatctggatttgctagatatgaaggaagccatgaccgagcgttatctgaatgagggcttttctggcggtgaaaagaaacgtaacgaaattttgcagatgttaatgattaaaccaagttttggcattcttgatgaaatcgactcaggtctagatattgatgccttaagagttgtatcacggggagttaatgccatgcgcggtgacaactttggtgctttaatgattacacactaccagcgtttgcttgattatattgtgcctgacgtggttcatgtcatgatggatggacgtattgttaaagacggtggaccagatttagctaaaaaacttgaaaaagaaggatatgcaggtcttcgcgatgaacttgggttacatattaagttagttgatgaaaattaggggggaaaacgtcaaatgttgagcaaagaaaacatacttgtctcatcaaaggaaaacaacgagccttcctggttaactgatttaaggactagttcttttgaaaagatgcataaactttcttatccaaaaatgcagcgtttttcctatcaagattggccgttgattgctaaagaagattttaagtggcaaaaccaacctgacttttttataaaaaaagagaatcatgatcttcttaacgataagggaatcatcttatgcgatctttttacagcaataaagcaatatccagatttagttaaatccgcattagcttccgttattaaaaatgatgaagataaattaacggcttatcattatgcgtatttaaattcaggcttatttctttatattcctaaaaatacagttttagccgaaccaattacagttactttgaaccctacgcaagatccatatatttcacatttattgattgttacggaggataacagtcaagtgaaattcttggaagaaattcaaaatgaggataaagcagttaaatccgcaaacttaatggtggaaatcgttgcacatccaggtagtcatgttgaattttcatcccttgatgaaatggataaggatacaacgctttactttaatcgccgtgcaagaattgaaaatgatgcacatgttgaatgggcaattgcttttatgaatgactgcaacaccttaggcgatttggattcagaattaattggcgaaggcagttatgcggattctaaggcaattgcagttacaactggtgatcaaagagtcggtattaacaaccgagtaaccaaccgcgggccacattcaactggtttgataaatcaacgtggtgttttacttgaaaattctcaactaatttttaatggaattggtcagattgttcatggtgcacatggctctaaggctgatcaacaaaatagagttttaatgatgtctgataatgcacatggagatgccaacccactgcttttaattgatgaaaatgatgttattgctgctcatgcggctagtgtgggtcctgttgatcaaattcaaatgaattatttaatgagtcgtggtattccatatgatcaagctcaaagattggtaattcgcgggttcttaggggctgttcttgatgcaattcctaataaggaagttcggcaaaagatgattgatattttggaaaaaaaattaattgatggacaaactagacgttaagaaaattaaagcagattttccaattcttaatcaaaaaattaatgatgaaaaattgatctatcttgataatgcagcaactagtcaaatgccgttagttgtagaaaaacagattgaacattttactaattttgatcgcgctaatgttcaccgcggtgttcatactttagggctaagggctacacaaaaatatgaaaatgcccgtcaaaaagtagctgactttattggtgccaaaaatgcaagtgaaattgtatttactagtggttgcacagatagtttgaacttagttgcggcaacttatggtgagcaaaatatccaagctggggatgaaattgttgtttcaattatggaacatcatagcaattttttgccttggcagcagattgctttaagaaagaacgctaagttaaagtttattgaaattgatgctaatggtcgtttagatctggaagatgcaaaaagtaaaattactacaaaaactaaaattgtagcgattactcatgtaagcaatgttttggggacaattaatcctattgcggctttaacaagcttagctcataaaaatggcgcgattgttgtagtagatggcgctcaagccgtcggacactttccggttaatgtgactgatttagatgctgacttttatgcattttcaggacataaaatgtttgcgccaactggagtaggtgtgctttatggcaaaaaagctctgttagaacaaatgccgccttatcgttttggtggtgaaatgattacaaatgtaactagaaaaggagttacctgggcacctgtgcctcaaaagtttgaagcaggaactccgaatatttctggcgtgatcggcgtaggtgccgcaatagattatttaggaaagttagatttaactttaattcaaaaacatgaggatagtttaacagcatatgctttaaaagaattatcaaaaatagatgacttagtggtgtatggtccaaaagactgcagtaatcgtactggtgtgatttcttttaatttaagaaaaattcatccacatgatttagcaacagcacttgatttaaatggtgtagaagttagagcagggcatcattgcgcacaaccattgatggaaagccttaagacagaatcaactgtacgtgctagtttctcaatctataatacaaaaaatgatattgatcaattggttagttcaattcaagaagcaaaggagtttttcggtgagcttagataaattaaaaagtttgtataaagcagttattctcgatcatgctcaaactccacgcaattttggacaacttgctaattatactaatgaaacgactgtttataatccaacttgtggtgataagattcacttaactattttggttgagaatgatcaaattaaagatattgcttttgatggggaaggatgcactattagtaaggcttcagctagtatgatgacccaattggtaaaaggaaaaaatattgaacaggctattagtttttctaggatattttcagacttagcagctggcaaaaaacgtagtgaacaagacatgcaaaaactagaagacgctcaagtcttgataagtattatggaattcccggcgcggattaaatgtgccaccttggcttggtggggattagatcgagcattacttggtaaagaaaacgaggatgaggataatgactaaagcagaagaaatagttaaagatgaagattatcaattcggctttcatgataatgtaaaaccaaaattttcaacgggacatggtttaacagaagatgtaattagacaaatttcggctgaaaagcatgagcccaagtggatgttagattatcgattaaaggccttccatatttatgaaaaaatgccaatgcctagttttggtcctgatctttcgggtttagacttagatgatatgctttattatcaaaaaatgactgataaaaaatatcgtgattggaatgatgtaccacaggatattaaggatacttttgaacgcttaggtgtaccacaagcagaaagaaaatatttagctggttcagctgcccagtatgaatctgagatggtttatcacaagatgaaagagcaatttgataaattagggattatctttacagatactgatactgcattgcaggaatatccagatttattaaaaaaatattttggcaaattagttccaattgatttaaataagttttctgccttaaactgtgctgtttggtcaggtggcacttttatttatgtacctaagggagttcaagtccctgcacctgttcaagcttactttagattaaatgcggaaaattctggtcaattcgaaagaactttgattatcgttgatcaagatgcacaccttgattatgttgagggatgtactgcaccacaatattcatctgactctcttcatgcggctgtggttgaagtaaatgtgttggacaatgcatattgccgttatacaactatccaaaactggtctgataatgtttatagtttggaaactaaaagagccgttgctggcaagcatgctacgatggaatgggttgacggaaatttaggtgccaaggtgaccatgaaatatccgagcgtttatctaaatggtgaaggagcacgtggtaccatgctttcgattgcagtggcacaccacgggattcatcaagattctggagcagggatgtttcataatgcccctaacacttctagctcaattgtttctaagtcaattgccaaaggcggtggctcaactgattatcgaggaagtgttaagttttctaaaaagtcggacggttctaaggcgcatgttgaatgtgacacgattattatggatgatcaatcatcttcagataccatcccaactaatgcgattgaaaactcaaatgtggcgatggaacatgaggcaacagtttctaaaatttctgaagatcaattgtattatttggaaagtcgcggtatttcagaaagaaaagccactgaaatgattattatgggatttgttgaaccgttcaccaagcagctgccaatggaatacgctgttgagcttaatcgattgatcagcttccaaatggaaggagcaattggttaatgttagaaatagaaaatttatctgatcaagaaaaagatgtttaccaggcattaaaagatgtaattgatccagaattgcaagttgatattgttgacttaggcttgatttatggcattgaggtaaatgatcatctttgccagattacgatgacactaactattatgggatgtcctttgagtgaatggctgaataacgaaattaccaaggcagcagagagcgttgcggaaatcgatgattgtcaaattaaactggtctggtatccgcaatggaatccaaatatgatgtcgcgtattgctcgaatgacactaggaatccatggataggagcaccattgatagaaaatcatagttttatttcatatgctaatggtaaatcgctagctgagattaatagtacgattgcggttcctaaaactaagaatttctttagaatgctttttgcttatacgggacctggagcattagttgctgtaggttatatggacccaggcaattgggctgcttcaatcaatggtggacagagctttaactttttactgatttctactattttaatttccagtttaatggccatgctgttgcaatatatgtcggctaaattaggaattgttacgcaaatggatttagcgcaggcaattcgtgctagaactagtaagagattgagctttattctttggattgtaattgaattagcaattatggcaacagatgtggcggaagttattggtgcagctattgccttaaaccttttatttaaaattccactagttatagcaacatttatcactatttttgatgtgtttctactattattattgtcaaaggttggtttcagaaaaatagaggctttgatttcatgtttgattatggtgattttatttgtttttgcctatcaagtcatgttagcagagcccaattggagtaagatcttcttgtctgtttttccgagtcccgaactagttgcacaacatcccgtggttaatgggctttccccgttaacaggtagtttaggtattattggtgccactgtgatgccgcataacttttatttgcattcttcaatttgccaaacaagaaagataaatcatcatgatccagatgatgtcaaaaatgcagttcgttttactacttgggattcaaatattcaacttattctagcattctttgttaacgtgcttttgctaattatgggagcagctgtttttaaaagtggagcggttaaagatagttcattttttggactttatgatgctttaagcaatactgcaatgctaagtaatccaattttgatttcagtagctaaaactggaattttatcagttctctttgccatagcacttcttgcttcaggacaaaattctactattacagggactttaactggtcagattgtaatggaaggcttcattcacttgaagatgccactttgggcgagacgattatttactcggctattatccgtaattccagttatcatttgcgttgttatgacagctaacgacacaatttctcagcagcactttgctctcaacatgcttttagaaaattcacaagtcttcttagcttttgctgtcccattttcgattgttccattattaattatgactgatgataaaagaatgatggggcaattcaaaaataggagaagctggtcggtcttaggctggatcagctcgattattttaattttcttgaacttatataatttgccggcaacctttgtttcatttaatataatgcctaagcaagatgccaagattttcgcttatgctattattgtactgattattttattgctggcttggacctgctgggatatggaaaaaagcaaaattagacattaaaagcatttcataataggagaagcaatgtaataaatagtttagatttcattttagcaagtgtaatagcttactttttattatgtaattagatctaaaataaaatcaaaaaatctgaagaaatttaaaatggaggaaaaactatagaagccaaaaatctatttgatactaactttggtaaagttccccaaatatatttagggagaaacaaagtagtcgaaaatgtagttgaatcatttgaagatgttatcaaatatcgattatttacgggatgcgtggagtaggaaaaatttctttattgtctgatattacatcaaatttaactaaaaaaataattcccggatttaaaattgaagtgcaacactaagtgttaaacaaaaaggccatgaagacctaaacttgaagtgacgaaaaatcaagaaaggaagatcttcatgaccaattcaaattctagcatttctaagcactatcatcaattaaccagcgtacaacgtggacaaattcaagcaatgctggattccggcataacttcccgtactgttatcgctcaagaagtcggctgccataagtcgacaatcagtcgcgaaatcaaacgcggaagtgtcctgcaaagagacagcagctatttattgtatgagcactattacgctgatactgcacagatttattatgagaagcgtcgcaaaaactgctatcagcgcaatccattgaagcattatgctgtctttttgagaatgctctccagacgctttaaagctaaatttgatgccaccagcatcgatgagttcgttggtgaattcaaaaggactatgccaggctacccttgtcccagcacaccaactgtctatcgctatattgatcagggcttgctggacataagcaatattgatctgcctatgaagctcaaaagacgcaggaacaagcgtcatcacagccatggcggtcacgctttgcacaagaagcatcttggcaattccattgaacagcgtcctaaagagattgaagacagaaaagctccgctgcactgggaaggagatctggttaaaggcgtcagacgcaagaatcagcctgctttaatgactttgactgaaagaaccacacgctttgaagtagttatcaagattcctgactatcgggcaagcacatgccaaaggctgcttcaaaaggagattgacagacatcctgcctggtttaaatcaatcacgtttgacaatggctctgagtttgcggatatgaccaagatcaagggctgccagatttactttgctcacccatattctccatgggaaaggggcaccaatgaaaactgcaatggtcttttgcgtcaattcttccctaagggcaagagcatgaaagacaagtcaaaagcttatgttcaacaggcaactgatgccattaaccacaaatatcgccgaatcctccaatatcacacagcagaagaactcttcaagcaatatatttcctcatagcctaactgttgcacttaatttgacaattcaggtaaaaaaataattggatagttgtatatttggcaatgatttactagaaagccttattcaaagtatttatcgtgaagcaaacacaaaaaaagcctcttaaagaagacagaactctacacgtcaatctttaagagttttttttatttttgaaagtattgtttaactaatgaaaagttattactgttggctgctattaaatcaatagttgtttgctttgataaatatttttttaatgttcgcttgcaaataccaaaacctatcatgaacttgtcactgacaaaaacaacatgttgaaaagatctctgaacctgtttcagaaaagtgaccacggggcgtggcaaatctgcataccaaattggtgatactaagattagagtattgatatttgattcaagtttaactggtttaatagcaacattaatgtgccgaaaacgttctatttttgcctgtgaagttaactcatgatatttattaggatacggattaactggaataataggtgttgcattaaccccataataatgagcaattcttttagctaaacgctcattattgccactgtttgaaaagtagactatttgtttattcattttaagtcgcttcacattaatatgtttaaagattttctttgaagaaagcggcagctttttcaactgcttgatcaacgtattcgggtttatcatatagatcaccgtgagtagcaccttcaatagtgaatagttctttgttagttgaagctgcttttttgagcagatcttctgagaaacggaaagtgtcagcgttgctacccgcaatcatcaaaattggttgagttgagtagcgatcagcaaacaagaaagtggagaagtcagtcattttatcaattgacatcattgataccttgttagttgaacgaggatgttgaacacgtggggtacgataatattcatgagcttctactaaagtattaggcatcccttcagttacttcttctggaacgaaagttccataaattggctcagcaccattagcttcacgagttctttgattagaagcttcttcaagtaaggctaattgagtttcaactgaggtttttccgtcaaaaccgtcacgaatccatgatgctggatcgctcatacttacagctacaacagctttaattcttcggtcggtcatagctgtatgcattgagtagccaccgccagcacaaatacctaactgacctaaacgattattgtcaatgtatggcaaagttgttaaataatcgatagcgcattttatgtcttccacacgttcataaggagcttctaattgacgagggttgccaccgctttcaccttgatgtgaagtatcaaatgctagggcaataaagccatactttgctaaccgtgagtcataattagttgcaatttgttccttaactgcaccagcgggagatgcgattgagaaagcagggtattgcttgttttcatcaaaattatctggaaagaataagataccagacatgtcgtgttcgttgtttttaaaagttactttcttttgcatagttgtagtctccgttcatttattgttgcttattttggttacgattaagtaaacacttgattttattataataaacgaatgatcgttcactgtaataataaaaattaaagtgctactttttaatagcactccaagctaagttaattaatacatcaattctttcttcagtaaaatctatttctcctttgaaatgacgcttagctaattcggtaattggtggctcaatgtaggcaaataataaattagcgtctacatctttaaaagttccctcctcttggccttttttaactaattgatacattggagtaaaataggtgcttgcttcgcgctcatctaattcagtcatataaggcgagttagtgaattgttgcaaaaagagaaaagcatcctgattatctaaaataaaatcaatatagttacgaataaccttagctaggctagacttagcatcatcatttgttgtatcagtaaacattttggcgctcatttttttcttagtatctaaatacaattttttcaacatatcatctttattcttaaaataaatataaattgttgaagctgaaacaccggcatgtttagcaattttcgacattgatgttgatgaaaaaccttctttatttagaagtagaattgttgcttcataaatagcttcttttttgtgttcatctttgtatcgcatatttgtataataaacgatcattcatttatagtcaagcaaaaaattaaatattttcaatattagtaattggttctcgttaaacaggctttatcctacttgcaaaacggaatgaacttggaattatctagcctacaagtttgaccactttgaaaaccatgtgatgtcatttttagatgaagaagaatattatgaattaaagaaaaaagaaatgcttgatgagaataaacatctgataagatagtagtaaaaaagctgtggagccgaatagatgcttgattatagacaattgaaagaacggtttgctcacaatgctaaccctgaatgtgctagacaaatgaaaaatatatgcgaaatcatggttcgtgattttattgagtaaaatcagcaagagttggcaccgttgtcaattcgtgaagggtcaaagtatattgagcatcgttgctttgtttagtaattccaaatcaaattgagaggataagtaaatgtttcaacagatgaagtattttattgcggtggttgatcgacataattttacccgcgccgccgaagaaaataatatttcccagtcagccatttcccagcaaatcaaggagcttgaaaatatgcttgatgttaaattgtttgaccgaaagggaagaagttttgaactgacggcagctggtgaattcttctaccaacacgccaaagaagttgttaaaacaactaatgaattaattgatcagacacaaaaaattggtaaattaccaatcaattatgaattacgtttaggctatttatcgaattttggtactaacgaatttttgcatactgttgcccatttttcgcaaatgtatccagaagtcgaggttaaaatcaaaagcggaactcatgaacagttatttgagttattaaaacatgatcgaattgatctggctttctccgatcagcggcgtgctttatcaaacgaataccacaatgaattcttaactgaaactgattttatggtagttttaccattgaactatccagataataaccgtattttagcaacgcaattagctgacttatcatgcattttaattgttaatgaaacacaaaaagcggctgaggaacaatattatcgggatgctttaggaataaaaagccggtttttaacggttactactatcgatgaggctcaaataatggtagcagccaatcaggggtactttattgttaataaacgaactcaagcgatgattaataaagaaactgttaagacaattccgctttatgccggtgatattccccttcaacaaaattactatacatattggaaacaagataattcaggcttttacattgaaaagtttgctgagctattaaagaaacaattttaagaaatagactatgaggtaaaaataaacgtcaaaaagaagcttcttcactaatttttggcgtttttttgtatataagaatttagcttgataagttttacttatgattattaattgtaaatgtgaattggtttagttattgaagatcgttatgatatagacaattaatcaaagcaaaaagagaaaaactggttttgataaggctttgatggaacagttattagcaaaggacgatttgatgacagataaagaggtaattattgacctttaccgccaggaaaatcgggcaatcgtagataaagacattgaaaccttgggtcagattttagattcaaccatggtattacaccacatgactgggtatgctcagcccaaactagaatggatcgatcaaatccaaaatggtgagcttaagtattattcttctgatgaggagcagatctcagacattcagattgctgggaatcacgctagcttaattggtcacaataaagttaaagctagcgtttggggaagcccagtaagtacattgttgcttcaaatgaagatggaatttgcgaagattaacggtaaatgggcgatcactaagcagatcgccagcacttattaaaggaggtcaaatgttatgaagaatattttaattattggagcaacaggagcattggggactacaaccactcaaacagtattaaatgaaacggacaatcacttaacattatttgcgcggtcagccaatcgaattaatgttattgatcctcaacgagaaactgtaatcagtggggatgtattaaatgatcacgatttagacaaagcgttggtaggacaggatgcggtgtttgcagcattaagcggtgacttagttgcctatgctaagcagattgttgcggcgatggaccgtaataacatatcacgattgatatttattagttcgatgggaatttataatgagattcctgcttcaattggtattagtagtaatttggaaagcaacccaattcttcaatcatatcgggacgctgctgacatcgtggaagcgtctaatttaaactataccgttattcgtcccggctggtttactggtggtccagttaattatgaaattactcataagggcgaaccatttggtggtcccgatgtttcaataaaatcaatcgttgatttggttacaaaattacttaacgatgatgagctttattcctgcgaaagtattggcattaataagccgagttaaatttttacttgccttgtagtggactttaaggtttacagtttgagttaatacaatgtaaaaataattagaggagcgaatttagatgaaagcagctgtatttatggaatctggtaagatggaagttcatgaggttgaaaagccaataatccaaaagccaacagatgcgattttaaagattgttcgtgcttgtgtatgtgggtccgacttatggtggtatcgtgggattactaatcgtgaaaaaggatcattagttggacacgaagcaattgcaattgttgaagaagttggcgataacgttaaagatattaagcctggtgattttgtaattgcaccatttactcatggttgtggtcactgcgtagcttgtttagctggtttcgatggcaactgtgttaaccaagaagctggcagtaatggtggttaccaaggtgaatatcttcgttttactaatgctaactgggcattagtaaagattccaggtcacccctcagattacacggacgagcaattaaacgatcttttaactttagctgatgtgatggcaactggttaccatgcggctgcaagtgctgaagccaaggaagacgatacggtcgcagttatcggggatggtgctgttggcctttgtggtgtaatcggtgctaaattacgtggtgatgatgcagttaagaaggttcttgaatgtgttggggccgtatctgctattgaacaagctggcaagttagctcgtccaggcgcaattgttggtcgagtaggtgttccacaaaccgaaccatcatcaaacacgcttttctggaagaacattggtcttcgcggaggaattgcttccgtcactacttatgatcgtgcgattcttcttgatgctgtattaaaaggtaaaattcatccaggaaaagtctttactaagcgttttagtcttgacaaaattcaacaggcatatgaagtgatggataaacgtgaagcaatcaagtcattaattatcgtcagtgaataatttaatcgtccatcttaagataaggagtgtagtgaatatgagtacaatttttatcgttggttcgtcatccggaattggcaaagcaacagcaaaattatttgcagaaaaagggtgaacggtgattgctactatgcgttcacctgaaaaagagaccgaattaacatcctatcaaaatgtttttatttatccacttgatgtaacgaagcctgaacaaatttctcagacagtctcggaagttcttaaaaagcatgaggtggatgttttgttcaataatgctggttatgggatgaagtctcgctttgaggacatgaccgaagaagccatgcagcagtccttaaacacgaacctgctgggaatgatctgtgtcacccaaaaatttatcccatatttcaaaaaaaagaaaagtgggttaattttgactactacttcccttgctggagaaatgggattagctctagatggtatttatgcagcagataagtgggcggtgactggagtatgtgaaatgctttatcatgagttagcgccatttggcattcaggtgaaaatcattgttccaggggttgtgaaaaccggttttaagatggagacattcgcaatgccgggatttgatcagttactaaaaaatcaaacaaaaatgttaatgccagacacagatagtttagaatcgcctgaggaagtggctcaagatatctttaaggctgtcactgataaggatcgtgatcggatgtgttatgttactggtaagattaccaaagaattatatgaaaagcgtcaaaaacttggtgatgaagcatttcgcagatacattcgaaaccaattgatgtcaaaacgaaaagtataaaattaaaaatagtttagaacctgaattgtcaaattaagtgcaacagttaggctatgaggaaatatattgcttgaagagtttttctgctgtgtgatattgaaggattcgacgatgtttgcggttaatggcatcagttgcctgttgaacataagcagctgacttatctttcatgcttttgcctttagggaagaattgacgcagaagtccattgcagttctcattggtgcctctttcccatggagaatatgggtgggcgaagtagatctggcagcctttgatctcggtcatatccgcaaactcagagccattgtcaaacgtgatcgatttaaaccaggcaggatgtctgtcaatctcattttgaagcagcctttggcatgtgcttgcccgatagtcaggaatcttgataactacttcaaagcgtgtggttctttcggtcaaagtcattaaagcaggctgattcttgcgtctgacgcctttaaccagatctccttcccagtgcagcggcgtttttctgtcttcaatctctttaggacgctgttcaatggaattgccaagatgcttcttgtgcaaagcatgaccgctatggccgtgatgacgcttgttcctgcgtcttttgagcttcataggcagatcaatattgcttatgtccagcaagccctgatcaatatagcgatagacagttggagggtagcctggcatagtccttttgaattcaccaacgaattcatcgatgctggtggcatcaaatttagctttaaagcgtctggagagcattctcaaaaagacagcataatgcttcaatggattgcgctgatagcagtttttgcgacgcttctcataataaatctgtgcagtatcagcgtaatagtgctcatacaataaatagctgctgtctctttgcaggacacttccgcgtttgatttcgcgactgattgtcgacttatggcagccgacttcttgagcgataacagtacgggaagttatgccggaatccagcattgcttgaatttgtccacgttgtacgctggttaattgatgatagtgcttagaaatgctagaatttgaattggtcataaagatcttcctttcttgatttttcgtcacttcaagtttaggtcttcatggcctttttgtttaacacttagtgttgcacttcaattttaaatccgggaaaatagtttagaataatattgactttattaaatttattatgtaatatacttactaaataaatggtatgaataaccactaagaataggaaattagctttaccttaactagtcagcgaacccaaattagtgtgagtggggatagaaaagtaaagtgaaagtagcctaggagtgcttgaagtgagagtaattgtaactttaggagggcgcgcccgttatagcgtcaacgtatctagttttgctatgtatggggtaagggaataatagtaatattattctaaaataaggtggtaacacgcgtgatagcgtccttataagctttatgcttataaggacgtttttttgtacctagtattaatataatttttatcgaaaggaatattaaaatgaaaaccaaaaaagcgagtattaggcggtcaatgattatcgcatcacttattttcggaatgttgtttggagcgggaaatcttatttttccagttcatttaggtcaattagcaggtagtaattggctaatagcgagtagtggctttctgctttctggtgttttactgccattaatggcgctgttggcaattagtattaccaagtcgaatgggatctatgatcttgcattgccgaatggtcgttactatgcacttatctttttaattcttgttcacgctactttgggaccactatttgcaactccccggacagccactgttccttatgaaattggaattgccccttatttatctaagtcaactaatactttgggattattaatctactcagcaattttctttagtttagtttatcttttttcaaatcatgagggaaagatcactactttaatcggtaaagttttaaatcccttgttcttgttattattattccttatcttcttattagcattcattaatccattgggttctagaaatactgctgctataactgcttcatatgcaaggcatgctttttccaatggctttttgcaaggttacaatactatggatggcttggcagcattagcctttggaattactattattactgcaattagagaattaggtattaagaagacacggcaaatttcacttgcaacggctaagagtggttttctcggaattgcgggagttgcaattatctatttagctttaatttggctaggcgcgactagtttgcatcaatttaaattagcagcaaatggtggaattactcttgctcagatttcacaccattacttaggaactgctggagatgcaattttagcaactttagcaactatcacttgtatgacttcagcaatgggattagtaattgccttctcgcaagatttccatcgccgttttcctaaaatttcgtatcgaacatttttacgaatcaattgtggattatcatttctatttgctaatttaggactcaaccagattattgcatggtcaacgccaattctgatgttcctctatccgttagcaattaccttaattattttagggctactttcaccactgtttaagaatgaccggctcgtttaccggattacaactgagcttaccttaattccagcattctttgacatgttaaatgcgttaccagctgggttacatgaaagtcgattattacagacactgcttggttttgcccaacaatacttcccatttttcaatttaggctttgggtggctgacctttgggattgcaggattaattcttggattgatttgtcatgtattaagagtaagaaagcgtctaggactaattagtgaataatatgtattcatcggtcgtaaaattaaatacattaaaaaaaggattaactttgctcatactgtaacttaaggtgcagtatgagcaatttattagaaattatatagatgcaatttatgaatgggattgaatattaatggaaagcctaataagataaactcaacttatcagcaaatgacaggtgtaagagagctttatatgaaaaagcatgttcaagtcctaaatattattggtgatggtgacagtacttataaagttgaaaagattaatggcaaaaatgcacaacattcaaaactgcatgaaaatgctcaagttgatcaagcattaattaagtttttatggaataaatagagttacttaatatatctattgtaaaagaataaaacaggtgctattattacagcataatattattcaatgaaagaagggtttaggttgcgcttttaatcttgtaattagcatcatagtccaaatagtaatttatattatggagagactatgtacttttagcaggattaaagcccaggccttcgattattacaattcattttcgtaaggagagagtctatgcttgctagaagtatgggctctttttgtgcgaggtggttggatgagtaatcttaagattagtaggttatcttttgaatatgaagacagcaatagatatatttttaaaaatcttaacctagaccttgatactgattggaaactaggtttgattggtcgaaacggaagaggtaaaactacttttttaaacttactgcgaggtaagtattgtggaactggtcaaattcaaggtaatgctagcttttcatattatcctgtaaaaattcaaaattctaaaaacattactttttatgagttacaagatcaggttgcctttgaacaatggaagctggaacgagagttaactctaatgaatttagatcccgatttattatggcagcctttcaataccttgagtggtggtgagcaaactaaaattttgctagctttatcatttacagatcaagattcttttcctctaattgatgaaccaactaatcatctagatgagacaagtcgtaaacaagtagcagaatatttaaatgggcatgatcaaggatatattgtagtcagtcatgatcgagattttttgaatcaggtaactgatcatatattagcgattgaaaatacagcgattcatttgtatcaaggaaattattcgacttatgaggtaactaaaaaaaggcgagatgattttgatcgtgaaaaaaataaaaagcttacagggcaagtgaaaaaattgaaccaagaaaaggtacaattccataattgggcagctaaaatagaggcacgtaagaaattagggatgaaaacacagcatattatcaatcgtcgaaccagattaaataagggagcgatcggacatcaagctgcaaagatgatgaagaagtcgattaatgcacgcaatcgcatggataagaggattgcggaaaaagaaggaatgctaaagaatattgaaaaagttcctactctgactatgaattttcaggcagattatcatcgtgagattttgcaacttaatgatcttagcttgcaactaaaaaatagtagagaactatttaaaagcttgactttgtctttgaataatcatgaaattattgctattgaaggtaaaaatggttctggaaagtcaacattaattaagcatttactgggtatctctcaaaatctaattgccaaaggtaattatgagctaattgaaagtttgaaaatctcttatttaccacaagaatttgtaatgtatagcggatcattaaaagactttgctaaaaaatatcatttgtcttatgaagctttgttgagcaatcttaagaaaatgggatttgcgcgtgctgattttacaactagaattgaaaaaatgagtatgggacaacagaaacgagtagctttggctaagtcattgacagaacctgctaatttatatttatgggatgagccagcaaattatttagatgtattcaatcaagatcaattaattaagcttcttaagagtgtgaagccaacgatgttactaattgagcatgatccttacttcattacatcggtagctgatcagcagattaaattaacaaattaactagatatttctataaaataatcttattaggaaaagtaaaattataagatatattgagactgtaaaatagtttgtgtaaggatgaatgattccttaaatttatttctttaaacattagaaaaaggagttcctttctcgtatgattggtttgaacaaaaaaaacacatacagaaagaagaactccttcatgaatgattttaccaaagattttgctcaagctctattcaatccagacaaaataaatgatttattgcgcaaagagctacaacaggctgttaataacttgctagaagctgaattgactgcctttctaggctatgatccctatgccagaaatggctggaatactggcaattctagaaatggtgcttatttccgcaaggttgatacgcagtttggaccaattgaagtgcaagtgcctcgagaccgcaacggtcagtttcatcagcacacgctgcctgactacaagcagcactcggatatcttggaaagcatgattatcaagctttactccaagggcgtgaccaccagggaaatagccgatctaattgaaaagatgtatggcagccattacagtccagctcaggtatcaaatatttccaagcagatgattccaaaggttgaggcttaccacaaacgcaagctaagcgacaagtttttctgcgtctatttggatgcgacataccttcctttgcgccgagaaacgtttgagcgtgaagcagtctatattgccattggcattaaacctaatggacataaggaagtcattgactactgcattgctcctagtgagaacattgaagtctggacagagatgcttcaaaacatgaagtccagaggcttgaagcaagttgaactctttctttctgatggtgttgttggcatgaaaacagccttggccaggacttatcctaaagctcattttcaacgctgtttggttcatgtcatgcgcaatatctgcgctaaagtacgcgtcgacgatcgtgaaaagatcatgaacgaattcaaacaggtgcatcaacagacaaacaaagaagaagccacagctgtcctgcatgacttctataccaaatggggcaaggtttacagccatgttatcagaagcttgaaagacatagaaccagatctgctggtcttttataactatcccaagcagatcagagcttcaatttattcgactaacatgattgaatcatttaacaatgtgatcaagcgcaaagctaagcctaaggcagagtttccaactgaacagtcgcttgatgcttttattggtattcaggcaatgagctacaatgaccgttatttcaatcgaattcataaaggctttggtcaggttcaggacaccttagaatcctactttgattaaataaataattaaaaaatcaatttacgagaaagaactatttacacaaaagatttgacagtttcgatatattggttggaaagttcgattatcataggcataataatatagagatgataaacatgaaaaatgaattttgtcacgatgaaatgaaatgtcagaaaaattgtccttgtgcagataaggatggcatttgccactgcaaaatggtaaatagtaaagaatgtgtttgcaagagtcattgtaaggaacaagaaaagtaacaaaagagcgccagtagatttagtttaagtttactggcgctcttttaaataaaaatcacataattttgttgcgtttaactggaaaaagaaatgaaataactggaactattagataaagaatcattgctagttttgcattgaataatgacagaatgatcaatattacatttaaaaataaagtaaccgtcatttttctaataaaggagcggctaataataatccgcatgatttgggaatagcgcgcagtatttttagcaccaaaatattgaattagatattctaagattttggcaattaaaaaaacaattcccaagttagctacagcgaaagaagaattttcagccataatccatttagtcatgactggcagaagtgataaatcagctaaaaaaaagaagtctagaatagcaatcgcttttgaaggcttgaaaatatagtatgaaaaagataaatgtagatcataccagaaatctgccacaataaaaaaagtgattaaaaagacagcaatattgctaatgaattgctgataatgaatttcatgcagagcaggttgaatttctaaaacaataattgtaataataatggccatcactccatcgttaaaggcttgtagactttcaggctctttcttttgggcctcagctaattcttttttgacattttttaatttatctttttcttggtctgagaattgattaaaattgtgtcttctgggatttcgtggcatggctattcctccaattaaattaatttattaatcaataattactttagcataatttttcacaatcaagctaaaaactgattcttataaattaatatcatattttgctttttggacaaatataaagtatgataaacagcaatcaaatattaggagggaatagtagaaactgtcaaatcttttgtgtaaatagttctttctcgtaaattgattttttaattatttatttaatcaaagtaggattctaaggtgtcctgaacctgaccaaagcctttatgaattcgattgaaataacggtcattgtagctcattgcctgaataccaataaaagcatcaagcgactgttcagttggaaactctgccttaggcttagctttgcgcttgatcacattgttaaatgattcaatcatgttagtcgaataaattgaagctctgatctgcttgggatagttataaaagaccagcagatctggttctatgtctttcaagcttctgataacatggctgtaaaccttgccccatttggtatagaagtcatgcaggacagctgtggcttcttctttgtttgtctgttgatgcacctgtttgaattcgttcatgatcttttcacgatcgtcgacgcgtactttagcgcagatattgcgcatgacatgaaccaaacagcgttgaaaatgagctttaggataagtcctggccaaggctgttttcatgccaacaacaccatcagaaagaaagagttcaacttgcttcaagcctctggacttcatgttttgaagcatctctgtccagacttcaatgttctcactaggagcaatgcagtagtcaatgacttccttatgtccattaggtttaatgccaatggcaatatagactgcttcacgctcaaacgtttctcggcgcaaaggaaggtatgtcgcatccaaatagacgcagaaaaacttgtcgcttagcttgcgtttgtggtaagcctcaacctttggaatcatctgcttggaaatatttgatacctgagctggactgtaatggctgccatacatcttttcaattagatcggctatttccctggtggtcacgcccttggagtaaagcttgataatcatgctttccaagatatccgagtgctgcttgtagtcaggcagcgtgtgctgatgaaattgaccgttgcgatcccgaggcacttgcacttcaattgggccaaattgcgtatcaactttgcggaaataagcaccatttctagagttgccagtattccagccatttctggcatagggatcatagcccagaaaggcagtcaattcagcttctagcaagttattaacagcctgttgtagttctttgcgcaataaatcatttattttgtctggattgaatagagcttgagcaaaatctttggtaaaatcattcatgaaggagttcttctttctgtatgtgttttttttgttcaaaccaatcatacgagaaaggaactcctttttctaatgtttaaagaaataaatttaaggaatcattcatccttacacaaactattttacagtctcgaatagtatgaaaaaaataatcgctaagcctgtgggaatgtttgaattattctatgatttagtttttgtatacgcaatttctcgaattactgcaatgattcatcatcctgttaatggcagtattcctttagttacttttcttcaatttttattggttgtaattgtagtaatgcaaatttggctttatcaagttatctattttaaccgatatagcaaaaatcaatttttagatattggcggtttaggtttaaatatgtttgtagcagtttatctggctaacaatattaatactgaatggcaagttacttttcactattttaatattgcaatggctgttatgatcttaattttattttgtcagtatctatttgtaaaagcagataataatgataaacaagcctttttaatcattttaggaatagaatttatcttaattattgtaggattaatcatcggctaccctgttggaatttatttttgtataagtggttatattgttggttttattttgccattgtttttaaaagggatgtttaaaactgaacgagtaaatttccctcatttggtagagagagtaagtttaatcgtaattattgcctttggtgaggctatcgttaatttgacaagttatttcaatagtaagacacctttagtttatgctgcttttttgtttttatctttagtattgatgtttgcaagctatgtagttttatcagataaattaattgaccatcatcagataagtaaaggctttgttttaatgtatagtcatattgcaattgtagtagcaatacttttgtcaacagtagcaatactgtatttacaagtgcatgacataaataaaacttttttgtttttcctgattattttttcaatggccttatattatttctcattagctataaatcaagtatataacaagagtgaatgtcgatttagtattcgtaatctgttaacattgctactaatttttgcactaggagtaagttacttatgggttgtgataaaatctaaaataggtatttcaatttacctattaatttggaatttgttatttttcttagaattttatattaaaggcaataaaaatgaattcagatgatcaatttatcaagtgggcgacagatttacaaagtttagctcaagcagggttgcattatggtcatgatgtatttgatcgtgagcgctatgaaaaaatccgtaaaattgcaggcgaaatgatggcagctaggacaggactacctaaagaacaaattaaaacactctttttgggtgatgagggctatcaaacacctaagattgatacgcgagcagcaatttttaaggataataaaattttgcttgtccgtgaaaaaatgactcaggaatggtcattgccaggcggctggaatgattatgaccaaactacagcacaaaattgtgttaaagaggcatatgaagaagcaggtagagtagttagacccgtcaaaattattgcagttcaagatcgtaatcatcataataaaccaattttggccaccaacattacgaaggtattttacttatgcaaagaaattagtggtgaatttaagccgaacgatgaaactgatgcctgtgattattttgcattagataatttaccgaagctttcacttgggcgaaatactgaggaacaaattaccatgtgttttgcggcaaataatgatcctaattggcagactcaatttgaatagaaaatttgaaaaataaataaaaaagttgttgacaacgattatattttgattaaaatagttattaacaaatttaataaatctgaaaacaaagagaaagaagagtaatttagacttaatttacagcgagtctcgttaggtgtgaggagataaatcctaagtttaaatgaaaatcactttcgagttctatttcttaacttaaagtaagaagtagtgggagcacccattatagtgcctacgtatcgtcaagcagttgactgtacgtgaaaggtattgctagcaatagtgatataaataaagggtggtaccacgctcaaagcgtccctcagttacaatttgcagctgagggccttttttgtttatcagggatgttttggaggagagaaaatgacagatcatacatcgaaaaaacttacatggaaaaattatctcgttgttgcttccttgctgtttggattattttttggggctggtaacctaatctttccattacatttaggacaactagctggagcaaattggggaacagctgcagttggctttttgatcacaggggttttattaccattattctctgtattagcagtagcaattactcatgcagacggagtatacgatatcggtaagccgctgggtgccggatttgcagtagtatttatggttttaatccatgccacaatcggaccattgtttggtaccccaagaactgcaaccgtttctttcacagttggtattgcaccatttatgccgaagaatatgcaaagttccgctttacttgttttttcagctttattctttttagctgcttttgctttttcttatcatcaaaataatatcttgtctaacgttggtaaggtattaaacccattattcttagcattattattcctagtgtttcttgtagcttttgctcgtccgttgggtaatccacaaactgcagcagtaactgcagcttataagcatggagcattagtaaatggcttcttagaaggttataacacaatggatgccttagcaggcttagcctttggggtcacggttgttacagctgttcgcggcatgggacaaaaagatgctaaaagtgtttcaaaagttgttgctaaatcaggtgtcttggccgttttagaaatcggttttatctacttgttattgatcttaatgggtgcaatgtcactcggacgctttgcagtttctgataacggtggggtagcctttaaccaaatcgttaacgtttatggcggtgtctttggtcaagctttacttgcattcttattgacagttacctgtttgactactgcagttggtttggttgctgcttttgcgcaagactttcataagcattttcctaaggtaagttaccacgtttggttagcacttagttgcttggcatcattcttaaccgctaactttggtttggatcaaatcatttcatggtcaacaccgatgttaatgttcttatatcctttatccatggttttgatcttgctatcagtttgttcaccattgtttaataaggaaggtgtagtttactttttcgtaatcctatttactgttgtgccagccttaggcgatatggtggttgctttcccaagtgtagttagtcaaagttcattcggtttagcagtagcttcacttagaagtcatttgccacttgtcagcatgggcttatcatggttagtgccagcactggtaggtttagcaattggtttagttgtatatcatgttagaaataaaaagacagtaccggttttagaagaagactaaaatttgtgtattttagatgaaggcagtgattgccttcatttttttgcttctgagatgaatagttgtgaatagacatgataaaattaaaatgaaattattttaataaggagaaccacatgcttcaagtacgatacggtattaacttagcaccagaaattaaagaaaataagattgatattattaagaatgagccttttactatttgggatgcaggtgtaataaatattcaaaagcaaaagtactatttattagttgaaaaagacactagttttccaattttattaactaaacttgatgccaagctatttaataatgtttttgctaatgcgattaaaagctatgactttattttgtttaaacagcaacaaaaattagtttcagcggtaaagtccaagcaaatgtctttttacgatactaaaagccaagctagtttaatgctagaaaaaattcgtaaacttatagaggataatcaaagcgaatatttaaatttgattgatgttgtaaaagatgaaaagaatatggtagataagctaactgtaatgtcagcgactatttttgccttggatagtcagattggacaaaattttatttctaagatgattgatgaggttagtacgtattttcctattaagccgcaaaaaccaaatcgaagatataagtatgttgacttagtgccaaaatttgaagatttctctaattttgaaaaatatgaaaataaatcagtaaaatgcaatgaaaagattgttgctaaaattaaagaaaataatcagaaactcattgatcaatatgctaaatatgtaccagcagaaataggatatatccaacctgatcaaatgctgccggattatctaaatcattatttattacgtaataagatccatttagttactaatgatttaggagaagcgatttcttatttatggattatgatatctaacaataaactacatccgctagaaatagagcagattacaaatactttgaaaaatttctatgtatttttgagtagagtaggtcttattcgtaaaactgatagtaaagaaatagggatgaatattgactgggtagttgaagaaattaattcatactccgatcaaagcctggatgaggatttgataaacgacatgatagcggcaattgaagcaaatccgaaaaagattttggaacttgaagatttagatctgtctcctcaggatttgtctagaattttagaaggcttgcgaaaagatcttgagagtcatgataaaaagcagaaaacacgaaaaaagacaatttttgaaaatcaaactcgcaatcgagctacctatgaaattagagtaaaactaaagtcttttaaaccatctacttggcgtagatttattattagtggcaatacgtcagtgaaaacattagaagttgctatgctagatatgtttaatgcagattttggacatatgtttgatttgctgaataaaaaaacgcaggaacgctttgaaaatgcagaaagtatcgctgaagcgaaagattgggatccggctacaggcatagattatgaaaaagctaaggtttcgtattttgaaaagagagataaattattattaacttatgattatggcgatagctgggaattcgaagtagatattaagaacatcactactgatcaagcagctcctaagtgtccaaagatactttctggaaaaggttatggaataattgatgacattggtggtgtatggtctttgcaagattattacgatacgcctaaagataaagtagatcctgaaatgattgattggttaatgggtggagaagcaattgatttagataagtttgataaggaagaacttaatcaaagaatggaacaatataaggaataaatctgcattgtttaagatacccagcgtgtcatgggattgaagtgtttgaattttaattagtaaagtctatttaaacaagtccttatgtacatccttaaaatgcatccctttatacatatcaggggtgctatttttgatagcccaatttgaaattgtatttaaaactggcagaagcgtctttcccttatttgttgatgaatattccacccgaattggcatttcattatattgttttctttcaacgatatcttgttgttgcaattctttaagcgaatccgctagtgctgcatcagagatattttccatttgatcttttatttctctatacctcatagcctttttatgtcctaagatacataacaaccttggtttccatttgccaccaaaaatatctaatgcataatcaacagtacaatagtattcttttggtaattttctttgatacataattaacctcactcaataattctttagtagctaaagctctttttaaaatatgtaaatcttttcagctttatcttactataaaaatgtaagttgattaaagcagaaaggaaaattgatatggcagtaaaagcttatttagaaattacaatgcagattccagcagaaaacagaaaggcagctgcaaaggtttatagtgattaccgtaaaccatttttagaaacaattccaggtgctgaaagtaaggcattacttgtacgcaatgaagatgtgcaggtattgcatggatttgattcaattgaacatgcagaagactatctaaagagtgaaatgtttaccaagcatgtttttccaggtttgaaacctacttggactgctgatccagaagttagaatcttttcagttgtaggatagaatattaaaaatatcaaacggtttagtttgatatttttttatttaggttaagtaaagaggaaaaatgaaaataactaaaatcgatctattatatggtgatccagttgaagataattggcgaccttctttttgccgtatctatactgatagcggaatttatggtgatggtgaagttgctttatcatatggcggagcaaaagaggctgcttttgctgaaatgaaagaattggctcctatgttaatcgggatgaatccattagagcatgaggtcatctggcaaaaaatgtacagaaatagcttctttggtaaaaacgcaggtccggtaatttttggcgctatttctgcttttgatattgccttatgggatattaaaggaaaatattatcatactgcgctgtgggaactgcttggtggaaaacaacgagatcatttaaaagcatatgctagtcagctacaaatggggtggggagaatcaagaaggccagcagcgacacctcaagactatgcagataatgttaaaattgccctaaaaaaaggatttaaagccgttaaaattaacttcttaacatttgacgagcgaggaaagcaggttccatggcaaaaacagactgcttttttatcgaataattatttaaatttagcagaagagcgaataaaagcagttcgtgatattttaggaaaagatggcgaattaattttagaaaatcacgctttaactgataagttatcagctgttcagtatggaaaaatggcgtcaaaatataatattttgtattttgaagaaccagtgaaacctgatcccgatctattaagttatgttcatcaagaaacaggtctaaatattgcttctggtgagagaatgtattctcgttggaactttaagcgtgcttttgatcaaaatagcattcaagttgcgcagccagatatttgcacggctggaggagtaactgaagttaaaaagatatgcgatatggcagatacaagtgagcttggtgtacaaatccatgtagccggaagcaatttagcaactgcagtgtcactaaacttagaagcagcactccctaactttgtgattcatgaatataacgtcaatactgagatgccaaaaatgcttaagttaactaaatatgattatgaacctgacaatggtgtatttacagttcctaacaagccaggagtcggtaatgaaatatctgattatgcttttaagcatagtagggtagttacggttaagtaaaattaaggaatatctctgatattttgctagcaaagaaccactttttgtttctatgcctattagtattaaaaaatacgattaaaacaattacctaagcatttaagttagagtaatcgtttttccatgtatttaaaatttttacatcaatttcttcaattcatttatggcagcatcatagtttggctcatgagtaatttcatcaacaatttcacgataaacgattttaccgttaggatcaagaattcaaacactgcgtgctaaaattccagagtctggaatcaacaagccagttgccttgccaaaggatagattttcatcagacagcaattgcatatttttaactccttcagctgcacaccaattttgttgatcttggatagtgttagtcgaaatagttaaaaagttaacgtcaggaaactgatccattgttttgttaaaagtcttagtttgaatactgcagacaggtgtgttgatatctggtacaacactgatcaaagtatttttacctaataaactatctttagtagcttcttgcttatttttgtttaaaactgtaaaattaggcatttcatcgccaaccttaggtggtgtgccaattaattcaacttcttttcctttaaaagtaactttcatgaaattcctccttttattatcttttaacttaaatatagcaaactcagttcagtaacttaaatatttagcttacagatattaatttttagaatctaaaattttacttttgaattttaacatcttgtattttgaatttaaccacgtatttaaatagtgaattcggaaaggaagacttcttatgttaattggaacttttagcttattctcaataatgatgatgttaaataattggtctatcaatatttggacattgcttatttttattctttcatacgttgttatttggataacaatcaagttaacacaaaatcgccaaattaagaaacgtaatagctaattaataatcttcattcattcgctttatgcatagctaactattaccaatgaatattttttataatagttattttgatttagaataaaacaaagttagaagtgaggtaataatatggcaaaaaatgaagaagaagtaaaagatagcgtttttggttttggcaaatctaacgaagcctttgccaagttttttaagggtacaagttacctcaaacctttagcagaaagtaaagaagctaagaccgcagttcataatgtaagttttgaaccaggatgccgcaataattggcatatgcacacagtgccacaaattttaatcgcggtagctggtgaaggctggtaccaagaagaaggtaaagctgcacaaaagatgcttccgggtgatgttgttattgtaaatccaaatactaagcattggcatggagctactaaagattcgtggtttgctcacattgctattatggctggtaatagcaagaatacttggttagaacccgtttctgatgaagaatatgataaattgggctgattaatcggaaaattcaatatgtaaattataattaaaccaaaaaattcctcttaaagaagacgaaactttacatgtttatctttaagaggaatttttatttttgaaagtattgtttaactaatgagaaatgattactgttagctgttattagatcaatagttgaaactgtcaaattttttgtgtaaatagatttttctcgtagattgattttttaatcttttatttaatcaaagtaggattctaaggtatcctgaacctgaccaaagcctttgtggattcgattgaaatagcgttcgttgtagctcattgcttgaatgccaataaaagtatcaagcgactgttcatttggaaactctgctttaggcttagctttgcgcttgatcacattgttaaatgattcaatcatgttagtcgaataaattgaagctctgatctgcttgggatagttataaaagaccagcagatctggttctatgtctttcaagcttctgataacatggctgtaaaccttgccccatttggtatagaagtcatgcaggacagctgtggcttcttctttgtttgtctgttgatgcacctgtttgaattcgttcatgatcttttcacgatcgtcgacgcgtactttagcgcagatattgcgcatgacatgaaccaaacagcgttgaaaatgagctttaggataagtcctggccaaggctgttttcatgccaacaacaccatcagaaagaaaaagctcaacttgctttaagcctcgggatttcatgttttgaagcatatctgtccagacttcaatgttctcgctaggcgcaatgcagtagtcaatgacctccttgtgcccattaggcttgatgccaatggcaatatagactgcttcacgctcaaatgtttctcggcgcaaaggaaggtatgtcgcatccaaatagacgcagaaaaacttgtcgcttagcttgcgtttgtggtaagcctcaacctttggaatcatctgcttggaaatatttgatacctgagctggactgtaatggctgccatacatcttttcaattagatcggctatttccctggtggtcacgcccttggagtaaagcttgataatcatgctttccaagacatccgagtgctgcttgtagtcaggcagcgtgtgctgatgaaattgaccgttgcgatcccgaggcacttgcacttcaattgggccaaattgtgtatcaactttgcggaaataagcaccatttctagagttgccagtattccagccatttctggcatagggatcatagcccagaaaggccgtcaattcagcttctagcaagttattaacagcctgttgtagttctttgcgcaataaatcatttattttgtctggattgaatagagcttgagcaaaatctttggtaaaatcattcatgaaggagttcttctttctgtatgtgtttttttgttcaaaccaatcatacgagaaaggaactcctttttctaatgtttaaagaaataaatttaaggaatcattcatccttacacaaactattttacagtctccaatagttgtttgtgctgattttaaatttgcttacaaatataaatctaatcatctggagtcaattgatattagaaaaaagaataaaattaaaaacaggttagaataatattgactttgtttaatttattatgtaatatacttactaaataaatggtatgaataaccactaagaataggaaattagctttaccttaactagtcagcgaacccaagttagtgtgagtggggataggaaagtaaagtgaaagtagcctaggagtgcttgaagtgagagtaattgtaactttaggagggtgcgcccgttatagcgtcaacgtatctagtttttctatgtacggggtaagggaataatagtaatattatctgaaacttgaaagctaagattaacgctccttccccgcgcctcttggctttttcttatcaaaaataaaaacgcaggatctctctgcgttatactttaagtgtcgacctaaaaagtaaaggagatcctgcgcaatgaacagtatagaacaaatcgacacagaaaatgatactaaatccttaatttcttcatttattaatctacctgaattgtcaaattaagtgcaacagttaggttatgaagagatatattgcttgaagagttcctctgctgtgtgatattggaggattcggcgatatttgtggttaatggcatcagttgcctgttgaacataagcttttgacttgtctttcatgctcttgcccttagggaagaattgacgcaaaagaccattgcagttctcattggtgcccctttcccatggagaatatgggtgagcaaagtaaatctggcagcccttgatcttggtcatatccgcaaactcagagccattgtcaaacgtgattgatttaaaccaggcaggatgtctgtcaatctccttttgaagcagcctttggcatgtgcttgcccgatagtcaggaatcttgataactacttcaaagcgtgtggttctttcagtcaaagtcattaaagcaggctgattcttgcgtctgacgcctttaaccagatctccttcccagtgcagcggagcttttctgtcttcaacctccttaggacgctgttcaatggaattgccaagatgcttcttgtgcaaagcgtgaccgccatggctgtgatgacgcttgttcctgcgtcttttgagcttcataggcagatcaatattgcttatgtccagcaagccctgatcaatatagcgatagacggttggtgtgctgggacaagggtagcctggcatagtccttttgaattcaccaacgaactcatcgatgctggtggcatcaaatttagctttaaagcgtctggagagcattctcaaaaagacagcataatgcttcaatggattgcgctgatagcagtttttgcgacgcttctcagaataaatctgtgcagtatcagcgtaatagtgctcatacaataaatagctgctgtctctttgcaggacgcttccgcgtttgatttcgcgactgattgtcgacttatggcagccaacttcttgagcgataacagtacgggaagttatgccggaatccagcattgcttgaatttgtccacgttgtacgctggttaattgatgatagtgcttagaaatgctagaatttgaattggtcatgaagatcttcctttcttgatttttcgtcacttcaagtttaggtcttcatggcctttttgtttaacacttagtgttgcacttcaattttaaatccgggatttattaatctaattggtctagctaagttaactaaacaagtcaattttaagcgtaaatccaccgtttcattaaccatgattatctcttggctgatgtcagtacattttgctcggctttctttattcagagctaaggatgacaaacgtttttccgttagaactgctcgcaatgtacttaacgatggaagaatcaactggcaaaaactattatgcttgattgcagcccggctcattggctgcttaaaaccatttatcgataaaagacgccgacttgcttttatcgttgacgatacgctgatggctcggtctttttctaaaaagaccgaattgctagctaaagtctatgaccatgacaagcatgagtatttgaacggatatcgtggtttaactttaggctggagcgatggcaataccttcttgccggttaactttgccttgatgtcaaccaaaaccaagaaaaatatgattggagctgctcccattactgctgatgaacgttcaatttctggtaaaaggagaaatcaagctcagagaaagatgaatgatgtaactgtagagttgattagacaagccttacgattaggagtagaagctaaatacgtcttattcgattcttggttttcttctccaagaatgttttggattttaaagaagatcggtttagatggacttggcatgatcaagaagagttcaaagatttattacatttatcgccatcgccgctatagcgttaaagacttgtatgatcgttttgctgcttcaaacatccgtaaaaagaaacattatctttattcaagcatagttgatgctcaatatcatggacatagctttttattaaagctcgtctttgtctccaaccgtggaaacaagaacaagtatttggttttagctactactcagacaaagcttagccctgaagaaatcatccaactttatggtcgtagatggcaaattgaaacatattttaagacgtctaagcaatatcttgctttagataaatctcaagttcaaagctatgatggccaatgtggctatatcgcagttacagcaataacttatgatctattgacctggcaggaaagacaaaatacagatgataagacaatcggagatttattctatctaatgaacgaatccttacctgatattagattcgtagatgcattggtctacttaatttcagaattaaaagagcttaaacagaatagttttgaaaagatagatgaagtaatcaatgactttattaaccaactgccacgattcatacaaattgcactgaaacagatcatataaaaactaattacgtctaagaaagctcaatagtgacaggacttgagcttgattttggtgctttcaattttcagatacttaattacttgtttttgaatgtaaacatcataaactaaattcttttgccgcctcttctttagatagtggcccatttgctttagcatcttctgcaaaataaatatatcattttggaacaagtatctaagggtaaagttggtactatgatgggtgtcgggagtatgatcactggaattgcactagcacttgggtcgacctttggccgaatcgtccgtcctacaggcactaagtcggctgatttaaccagaatcgggacacaacatgcatatattttcctcttatgtttggttattttgatcatggctttatttatcaaatatgttggcagaagaactataactaaataacagaaaaatacctatactacatgtaaatattcatgtagtataggtattttatttactgtcttttttagctaataatttggctgtttgatgaccaattccagatgatgcccctgtaagtaatataacctttttcattatttttcctcatttccatagttgatagttatattatattttgcaaaaagcgacattaatatgacatcctgcgtcaattaaatagcaattgacgacagttgttgcatttcgaaaaatcgtatgctagtatttgcttacaaaaagtaagtaaataatttaggagttgataaaaatgaatattgaattaggtatctcatcatttggtgaaactacaccattagaaacaacaggaaaagcaattagtcatgatcaaagaatcagagacttattagaagaaatcattcttgcagacaaattgaatattgatgcatttgcaatcggtgaacagcatcgcaaagattttgctgtctcagcaccggaaatcattttagcagctgctgcttcgaaaactaagcaaatccatctttcaagtgctactacaaatctaccaacaattaatccaattagagtttatgaacaatatgcaacaatggatgcaatcgcaccaggaagagttgaaatcatggcaggacgtggatcatttactgaggcatttgatctattcggttatgatttagaaaattacgatgaactttttattgaaaaactagaaatgctactcaaaatgaacaaagaagaaattctcgattggccaaaaggaaagtttacacctagagttgatcataaaggaatttatccgcgcactaaaaagccaatccctatttctgtagctacaggcggaagcatagaatcgactatccgaactgcagagttaggtttgccaatcgtttatgcgataattggcggtgatcctttgcactttaaaccactaattaagttgtacagaagagttgcagaaaaagttggcaatgatttaacgaagatgccaattgctgcacactcttggggctggttaaatcatgataaagacaaagcaattaaggattacttctatcctaccaaattgttagttgatcaaattagtacggaaagaccgcaatggacagggatgacatatgaacaatatcttgaatcggtcggagaaaatggtgcaatttttgttggtgatagcgagactgttgctaataaaatcattaaagttatagaagaacttgggtttacacgtttctacctccacttgccaattgcctcaatgccgcatgaagatgtcatggatgcaattagaatttatggagaagaagtagtgccgaaggtgaagacgtattttcaaaaaaagactgagcaagatcgtcttaaattaaagtggaagaattaaatagagagtaataatatagggttcaagagtctagatgacttttgaaccctttttcacttttagagataaacctaaggaggatgcttattatgattattcgcaccgtaacaatggatgatttaaatgaagtagtagaactggaatctgacgcatttaagatgactaaaaagcaaactgaacaagatatgattggtagaattgagaattatcctgatacttttttagttgcacaagaagatggaaaagtgattggtcatatttttggtcctgcttttaataaacgctatattgaagatgaattatattttgaaaatcatcctaatcaaaaagatgatcgctatcaaatggtcttgagtttagcggtcttgcctgaataccgcaaacaaggcgtagcgacaaaattaattgaagcaatagcgcaagagggcagaaagcaaaatcgtcaagctatatctttaacttgtttaccgaaattgattaaattttatgaaaaacgtggtttttataatgaaggcgagaccaatgatgatattccagatccaactggtgttactagcgtaaatatggtaagggctttgtaaaatgacgcaattaactgaagaaatgtatgcaatttttgatcgggatgaattttcttttaaaaaattgaaatcgcaatattctgaagatgaattagcgcaaataaaaacagattttaaagaaatttggcagacctggaaagaaataaacttcctgaattgtcaaattaagtgcaacagttaggctatgaggaaatatattgcttgaagagttcttctgctgtgtgatattgaaggattcgacgatgtttgcggttaatggcatcagttgcctgttgaacataagcagctgacttatctttcatgcttttgcctttagggaagaattgacgcagaagtccattgcagttctcattggtgcctctttcccatggagaatatgggtgggcgaagtagatctggcagcctttgatctcggtcatatccgcaaactcagagccattgtcaaacgtgatcgatttaaaccaggcaggatgtctgtcaatctcattttgaagcagcctttggcatgtgcttgcccgatagtcaggaatcttgataactacttcaaagcgtgtggttctttcggtcaaagtcattaaagcaggctgattcttgcgtctgacgcctttaaccagatctccttcccagtgcagcggcgtttttctgtcttcaatctctttaggacgctgttcaatggaattgccaagattcttcttgtgcaaagcatgaccgctatggccgtgatgacgcttgttcctgcgtcttttgagcttcataggcagatcaatattgcttatgtccagcaagccctgatcaatatagcgatagacagttggagggtagcctggcatagtccttttgaattcaccaacgaattcatcgatgctggtggcatcaaatttagctttaaagcgtctggagagcattctcaaaaagacagcataatgcttcaatggattgcgctgatagcagtttttgcgacgcttctcataataaatctgtgcagtatcagcgtaatagtgctcatacaataaatagctgctgtctctttgcaggacacttccgcgtttgatttcgcgactgattgtcgacttatggcagccgacttcttgagcgataacagtacgggaagttatgccggaatccagcattgcttgaatttgtccacgttgtacgctggttaattgatgatagtgcttagaaatgctagaatttgaattggtcataaagatcttcctttcttgatttttcgtcacttcaagtttaggtcttcatggcctttttgtttaacacttagtgttgcacttcaattttaaatccgggaaagaaataaacttaaatgtttatcaaaaattaccacaagataaatttgctaaagttcatgttgaaagttggaccaatggttggaacttacgcgatcattactgggcagcttatcgtttgaatgctttagccgataaaagtccatgcatcggcgtgatgctggataataagcagctgcaggtttatcttatgtttcagcattataagagtgaaaagcgcggcgataatcctgaacaatacaataaattattaactgatcttcctgattgggcaaaagggcggacaactaataattggtacttatgggataaaaacgaaatggagtttgctgatcatttatccttaaatgagtatttaacagatgctgaaaaacagacttcatttaataaggaagcaactcaatccagtttcctattaggaaaatttgcttttagaaagcaagatcaagttgcagatatggaaaacttcatcttagatggtattgggcagctattgtcgttatatcgaaagttagcaaattaaaatacgttaaaattgtattttaaagtgttcatgctacataataaaagtaaatactgctgttattgtttaattaaagggataacaaatgaatatttattcaattattggcatgatcattttaggtttagttaccggcacagtaactagtatgattgttgccttaatttttgtcttcttaggaattgccatgcttgttgtgcatttaattaagtgaaatctatacgtaaaagtaataaggcaaaataacaaattgatattttgggaataagtattgctgtgctatattgaaggtgttactgctccatcattggtgcaattgatcataatccttctgcaggtacagttctccttgataaaaaataaaactaaattcatcaacgttatctaataatgatataatgtctgtgttggattttttagaaaagagataaaaacaaaaatgaatacaatcgcatttaaccaacaattatcagataagttgaacgaagaacttaatccagaattgttctctaccccaggtaagggtgagattacagttgttgctaatgaaaagaaagacttacgtgagtaccgtattattactaaggataataaagtagtcgatgtagtcgatgcatatgatgcagatcatgatgcagcttatcaaaagatgatggatttcttgaagaattaccgttaataattgaattaaactaatgggctagaagcttgataatgagtttctagtctatttttttgccaatttttcttaaaggattagctagatgtagtaataattttgccgttcaagttatttttttaaccacttagtaaaaagtaattgaatattaaaaaaatagcagtaatattaaacataaataagatatttttaatattttaatttgcttggagatgagacaaatgagtattacagagatttttaaggtcaataaagctaaattcattttaatttttctaatggttatcattggtacaaccgttgatgctgcttcgcaatatttgatgaccccggcctttaaccagctaaagaaaatgaatttatttggctttattatttttatttgtttggctattggctgtgatctagttagattagccttgattactagttcagattatttatacggaaagcaatcacaatcttatttgcatcaaattcgtgtaaaaattagtcgctacttttttaaaaatgaaattgcccaaactgctaaagtgcaaaatgaattggttgccaatcttgatcagctaacacagaattatttaaaaccaatcaaaaacggttttatgtacttgttgtctgtgcttttctcaattggaattttgttttcatttaactggcttttagtagtaatgacggtgattttaactgcaatttcattatttttgcctaaaacttttgaaaaaatgacttcatcggccacaataaaggttactaagaaaaatgaaaagttcttaaacactttagccaagtggatgagtggtctggatgaattacgaagatatgccagttttaatatatttagtgaatcagttaaccaaagcgcagacgaatataaaaaagcagctattcatcaaggagcaactattgctattgcagatatgatcacctttgtagttaatattgtgggacaaatgctcttgatggttttatgtgcttacttatatttgcaaggacaaattgtttttggtgcggtaattactactattcaatttagttcaactgtaatgaatggtgtttcagcatttgtaacggaatggaatttaattaaatctaccaaggatttgaataaggaaattactaatcttcaagctccagtaaaaatagctccagatcagcatcaagttaagaagattaacaggctagaagtaaaagatctggccttacaattcaaaaatggtgagtatttatcttacccagattttacagttaagcaaggtgaaaaaatcttgcttactggtgatagtggaactggcaagtcaactttatttaaattaactgaaaattgaaagcaccaaaatcaagctcaagtcctgtcactattgagctttcttagacgtaattagtttttatatgatctgtttcagtgcaatttgtatgaatcgtggcagttggttaataaagtcattgattacttcatctatcttttcaaaactattctgtttaagctcttttaattctgaaattaagtagaccaatgcatctacgaatctaatatcaggtaaggattcgttcattagatagaataaatctccgattgtcttatcatctgtattttgtctttcctgccaggtcaatagatcataagttattgctgtaactgcgatatagccacattggccatcatagctttgaacttgagatttatctaaagcaagatattgcttagacgtcttaaaatatgtttcaatttgccatctacgaccataaagttggatgatttcttcagggctaagctttgtctgagtagtagctaaaaccaaatacttgttcttgtttccacggttggagacaaagacgagctttaataaaaagctatgtccatgatattgagcatcaactatgcttgaataaagataatgtttctttttacggatgtttgaagcagcaaaacgatcatacaagtctttaacgctatagcggcgatggcgataaatgtaataaatctttgaactcttcttgatcatgccaagtccatctaaaccgatcttctttaaaatccaaaacattcttggagaagaaaaccaagaatcgaataagacgtatttagcttctactcctaatcgtaaggcttgtctaatcaactctacagttacatcattcatctttctctgagcttgatttctccttttaccagaaattgaacgttcatcagcagtaatgggagcagctccaatcatatttttcttggttttggttgacatcaaggcaaagttaaccggcaagaaggtattgccatcgctccagcctaaagttaaaccacgatatccgttcaaatactcatgcttgtcatggtcatagactttagctagcaattcggtctttttagaaaaagaccgagccatcagcgtatcgtcaacgataaaagcaagtcggcgtcttttatcgataaatggttttaagcagccaatgagccgggctgcaatcaagcataatagtttttgccagttgattcttccatcgttaagtacattgcgagcagttctaacggaaaaacgtttgtcatccttagctctgaataaagaaagccgagcaaaatgtactgacatcagccaagagataatcatggttaatgaaacggtggatttacgcttaaaattgacttgtttagttaacttagctagaccaattagattaataaatgaagaaattaaggatttagtatcattttctgtgtcgatttgttctatactgttcattgcgcaggatctcctttactttttaggtcgacacttaaagtataacgcagagagagcctgcgtttttatttttgataagaaaaagccaagaggcgcggggaaggagcgttaatcttagctttcaagtttcagtaaattaattttaggtaaattaacgcccagccaaggtgagatcattttttttgatcataatggtcaaaaattaaattttgatcttgatgaattaggctatattgctcaagataataccttgtttcctgacacaattgccaataatatcacgatgtttaatagtgctttaaataatcaaatttcaggtgtattagatcaagtaggttttaccaaggatttggataagatgtctgctggacttaatagtcaaattgatttggataaaggaaatttatctggaggacaaaggcagaagcttgtgttagccagagctttgattcatcaatcaccttggctattgattgatgaagggactagtgcaattgacagtgctgggacgaagcaagtattacaaaatttattgaatactccaagtactgtaattatgattgcgcacaattattctacagaattagtttcaatgtttgatcggcaaattaaattgactaatcgaggtgacgccgaatgagtttcaaaggctttattaaaactaattatttaagatttatttacattaatattttatcagttatttcaggtgtcgctgctattggtgcaggctacattcaaatgtactggctgacttatatcaaagatcgtgcttgggtgaagattttacttgcgacggctttaatggggattttatatttagctgctcaagggatgatctattatatccaatttgtaattcgagtgcaggaagaagaatataataaaaaggtgcgcgctcgtttggctacacattactttagagatggtcaaaatcatcaagtaccggccgtgcaaaatcggatgactaatgatttagaaatgattagaaaaaattattttgattggtatccaattgtgccgttctatggctcaatgtttgttgcggcattggtggctctacttacaattaattggtcaatctttttgactagtgtagtgattgatattgtttcttactttgtacctaaattagtacaaaagaaaatggaacaagcaactaataatgtttctgagcaaaataagcattatctagatgttttagctaaatggttctctggcttagaagaattaagaagatattttgctggtgctaagttatttcaggtaggtgaaaaaacttcaagtaaagtagaacaggctcatgttaaacaaacggctgctcaacagcaattaattattttgaatgggatctgtaacatggtaggacaaataatcctgttgtctttgacggcttttttgatcactaagaatttagtgatttttggtgcaattatgtctgtccaaaactttgcagctaatatttcgatcggcttacaacaaacaattcaggcattaagttttatgaaatcgtcacaggatttaatgaaacaagttgatggtgatgctactgtgattgaaaaagttaaagctggccaagaagagacaccagtagcattttcaacaaaagatttggctttgcagtatcctaatggtgaaaagcttacttttcctgatattgcagttaaacctggtgaaaagatcttattaaccggagattcaggtgcaggtaagtctactttatttaaattgattttaggtgaacttaagcctagtgcaggtaaagttgaatttcaaaatagtcaaggtttgacaattaagcctaatatgtcaagaataggctatattccacaagagccgaacctatttccgggtacaattaaagaaaacattacaatgttcaacaagcaacttaataatcaagtagctcaagtgcttgatgaagttaattttgcggccgatattaaaaagtttaaagcaggtgtcgatgaaaaaattgacttggataatttgaatatttccggaggtcaacgacaaaagatcgtattggcaagatcgaagatccatggtagtgacattattttgattgatgaaggaactagtgcaattgatcagacagcgactatggatattttacaaaaattattaaaaagcaagaccacaattgtctttattgctcacaattttaataaacagatgcaggaaatgtttgatcgcgaaattcatttaataaaagaataaaaaatcaattagagaaaaaactcccaaatattaatatttttaatttgaaccttgacaaaatggtgatttaaccagtaaattaattgcggattattaattaggatagattaattattggagttgtgaaaattgaataaaaaatctaaagctcctcaactcaaacgaacaatgacagcaggtcaaatggaaatgatctctcttggcggtgctatcggtgttggtttgtttatggggtcaacctcgactattaaatggaccggtccgtcagtattattagcctacatgtttgtggggttgattttatatattgtaatgcgggcattaggtgagatgctttatatcaatccagggacaggttcatttgctgattatgcaacagaatatgtgcatcccttagcaggctatttagcgatgtgggccaatgtctttgaatatattgtagtaggaatgtccgaagtagtcgcggcaactgaatatctgaagtattggtggccgaatatttcggcgctgtggtcggggatcatcattattgcctttttactactagccaatttagctagtgctaaggcttatgcatcactagaattttggtttgccatgatcaaagtaataacgattattttaatgattattttaggctttatcgttattttctttggtgtaggtaatggcggccacccaactggctttagcaatttatggtctcacggtggtttctttacagggggagtaaaaggctttttcttctcaatgtcaattattgttggttcatatgaaggcattgaattattaggtatctctgctggtgaagtagctaacccacaaaaagcaattatcaaaagtgtcaagtccgttttgcttagaatcctgattttctatgtaggagcaatttttgtaattgttacgatttatccatggaataaattaaatagcctgggttcaccatttgtaaccacttttgctaaagtaggaattactgcagctgcttcaattattaacttcgttgttttaacggctgctctttctggtgctaactcagggatttattcttccagcagaatgttgtttaagctgtctcatgaccacgaagcaccgggaatttttaagcatatttctaagcgaattgtacctgatcgtgcaattatggggatttctgctggtatttttattggttttgtcttgaacgtaattgcttcacaatttaatcattcagctagtgatttatttgtaattgtcttcagttcatctgttttaccaggaatgattccttggtttgtgattttattagctgaattaagatttagacggcataacaaagaagcgatgcaagatcatccatttaaattgccgttatatccattttcaaattactttgcctttgcaatgttgataatgattgtaattttcatgtttatcaatcctgatacgagaatttcagttatcgcaggggcattagtcctgattgtggcaacaatcgtctacttagttagacacaaaaatgaatttaagaaaagtaattaaggtgattattcacctttttatttttatctaaaaacactaaatctatggtttttcattatctaacatgcaagatctatggtatgttagaagaaatgttttttgaaaggtgaagataatggcaattcttgaacaaccatatttggatttgttagaaaaaattatgactgaaggacatgacaaggatgatcgaactggtactggaactagatcatattttggtgcccaaatgcgttttgatttgacacagggctttccacttttaacgactaagaaagtgccgtttggtttaattaaaagtgaattattgtggttcttacggggcgatactaatattcgctttttgttagagcataacaattatatttgggatgaatgggcctttaaaaattggattgaaagtgctgaatatcagggggctgatatgacagattttggcttgcgtagtcaaagtgatccagaatttaatcaagtttatcaagcagaaatgaagaaatttgatcagcgcattcttgatgatcctgcttttgcccagaaatatggcaacttaggtgatgtctatggggcacaatggcgtcattggaaaaagcggacaggcggttttatcgatcaaattgctgacgtgattaagcaaattaaggaaacgccagattctcgtagaatgattgtcacggcctggaatccggaagatgtgccaactagtgctttgccaccatgccatgtcatgttccaattttatgtagtcgatggcaaaattagcgtgcagctttatcaaagaagtggtgatatgtttttaggcgtgccatttaatattgcttcatattcgctgctcttgaacatgattgcgcgtgaaaccggcttaaaagtgggtgaatttgtacatactttaggggatgcacatatttatcgcaaccactttagccaagtaaaggaattgctgagtcggacgccatatgattcacctgaattgtggcttaatcctgaaaaaaagcacattgaagactttgaaatgaaagatatcaaagtgctgaattatcagcaccatggcacgatcaaggcaccggttgcagtttaggaggtctcaatgttaagttttgtttgggctgaagatcagcagcatggtattggcatcgatggccatttgccttggaatctgccggctgacttgaagcattttaaggaaaagaccataggtcatccgatcatcatggggcgaaaaacctttgcgagtttgcctcacttgttaccagagagaaaacatattgttttaactcatcgtcaagaattaaagcaaaaatatgcgggtaatgagcaagtgaagattgtgtccacattagctgaattaaatgaatatcttcgtcaacatcagactgaagaaatctgtgcaattggtggagtttcaatctttagggcgttacttgatcaagttgatcttttagaaaaaacagagatcaaagctaattttaaaactgatacagtgatgccagcgattaactatgatgattttgaattagttagtcgcgaagagcatcatcatgatgaaaagaacaagtatgactatacttttttaagttatcatagaaaaaataaataattgttaaaaagtctcgcagagttgcgtggcttttttatttttcgctataatggatgaaagtattttcagtataggacagaaaattatgacagataaacaaataacgggattaactcaagctgaagttgatcaaagaattcaaaatggacaggttaatcaagccattgatgaccagtccaaaacagctactcaaataattcgagaaaatgtctttacttattttaacttgatttttgctattttggctgtgctattggtgtttgttggtgcctggaacgatctgacttttttaccagtgattgttttaaacacgattatcggtattgtgcaggagcttcgtgctaaaaaagttttaagcaagttaaacgtgatgaatgcgacggaaattatcgcggtgcgtgatgggcaagaagaaaaaattcccatcgaaaaattggttcaagatgatgtcattcttttacaaactggtgaccagattccagctgatgcgcgggtaatctcaggtgagctgcgggttaatgaagccttgttgacaggtgaatctgatgaaatcactaagactaaagacgcagaattaatgtcaggttcttttgtagtttccggtaaggcttatgccgtcttagaaaaagtgggtaaagactcatatatttctaaattaacgatcaaagcaaaggcaatgggcagtgttgaacaatctgaaatggtgcgttcaatcaatcgtctggttaaatgggtcggcatcatcattattccggtgggaattgccctatttagtcagagtttctttttgaataatattggactcaagcgtagtatcacttccatggaagctgctttaattgggatgattccagaagggctatatttattgactacgattgccttagctctagctgctatgcgattagtgcgacaagaagtaatgctgcacgatatgaagagtgttgaaactttagcccgagtaaatgtcctttgtgtagataaaacgggaacaattaccgaaccgaagatggccgtagaaaaagctgttagtagcaagaattttactggtgatttaagtagcatcattgcggattttgctaaaaacatgccagctgataacgcgacgatgaaggcgattcaagcctattttaaagatggaaccaaaacggcggatagcgttttgccttttacctcagtcaataaatattctggtgtaatttttggcaatcagacaactttaattggtgcgcctgaaatggttttgcgtgatcaatttgcgcaatatcaaactgaatttgaaaaatatgcggcagaaggctaccgggtgttgattgcggctaattatcctggcgtattaactgaagataattccgccttaaaggaaaatgtacaagttctcggttatattttattgtcgaatccaattcgtaaagaagccaagtcaacttttcaatattttaaccagcaaggtgttgatatcaaggttatttctggggataatccggtaaccgttgctcgagtagctaagcaagctggaattaatggggcagataagtatatcgatgcgcaaaccattaaagatggtgaatatgagcaggccgtgcaaaactataatgtctttggccgggttaagcctgatcaaaagcgaaagtttgtcgttgctttgcaaaatcaaggtaataccgtagccatgactggtgacggagttaacgatattttagcgatgaaaaaggcggattgctcaatcgctatggcttctggtaatagtgctgcagtgcaagcttcacaagtggttttgctcgattctaattttgctaaaatgccgttagtggtgaaccaaggcaggcaagtagttaataacattcaacgttcagccagcttgttcttggtgaaaaacattttttcattcttgatggccatcttctctttgattatgacaatcaattatccgctgcagccagcccagatcacattgatctctgcatttacaattggcttgccgtcgtttttattggccttagaaagcaatcacaagcgaattcgtggaaagtttatgccaaatgttttagctcgggcaattccagggggcttaacagattggctggcagttgcaattttagtcattgcaggggcctctatctcacttgatcatggtcaggtaggcacgacagcgactatgttgctagtcttagttggttttatggtgatgtatcatatttcggcaccaataaacaaatttagacttgctgttatgggcttatcagttatctgtattattggctcaactatctttttccaaagattgttctcattgacaatgcttaataacaaatcattatttattttggcggtcttattctgtgcggcagtgactatctttagatggttatctaaaattttggatggaatcgccgaagtgttggttgtctttgatcaaaaaggaaagaacatgacttttgtggaattcaaggaagcatatgatcgtggcaaaaataatgtgaaataagaagataatgaaaaagccagagttttgctctgacttttttactaccttaatgattttcgatatccagcagcttgtgcggcagcttcactgttgaagtaaactgcattagctgatgacatatgataattttgcccattcattacatggtagatcttactgcgacgattgccaacgactcggtgttctgcagtggatacagtacctttgatatggtgaatggttcgtttcttggttactcgagaagtggatcgttttctagattttacatgttcagcaatagtactagacctatgtttaaccttagaagtaccggtcttgtaattaagcaacataccaggttgctcattaaaaatgtagacattaaagcgaggcccgtttttgctagttgcttcggcttccatttcaacgccgttagctaataggtcattccctttaaatattggagtaacccgatagcggacatagtttttgctcgaactacgtaaatattcagcaacctcattttcatatttaagcatatctggatcatttaattcacgcgtaccggtaatcaaattgcgtggattgttgttttgaccagtcaactgatagccgattagatggcaccgattatacaaccaaccactagcgattcgtttattatgccagccggtcggattccaagttaaagccgcacgctgactatgtggcattaatcttttatttagtaaagcattagcagcatgagctcggttcaaataatctaattggccatatttttgccatggaccttttttcttgctcagtgtactcttagaaaactgcggctgatcatgatcaacggtcacaatttctttgttgtggtatttcaaattgactaatgctttatctgaaacagcatagacggtttgattgttgcatgggacattagtattagcaaaagaaatgaatccaattgctgcagctaatgagagagcaaaacttcgaaagcgatttttcttcattttttctccttagcaaaaataaattatttaactatatcctaattatacaatgaaatcgcttttatctaataaaaattaaaaaagatgttgactagattaaaagaagatgataacttatttataacaaatcaagaaaacaacatcttgaaggactgagtaactagaacttctattgataaagagagccagcgtggtggtgaaagttggcaaataggagctagtgaatatgggtttggaacgatgaccggtggtgatatttagctatcggcggggctgcatccgttaacagtgcaggctattttttgatagccagtgaggttgattacgtaagtgatcagcgaattaaaggtggtaacgcgagcactcgtcctttggggatgggtgcttttttatttttatcaaagtaggagtgtattttatgagaaaacggagaagaagaaataccattatttggacgatcattgggatactgatcgtgattgcaggttggtttagttttggtccaggaattcccagtcaaaatcaggcaaaaactgttacagtcggaatcgttggggaaagtaaagccgaagccgcaatttggaagtcaattgctaaaacggctaaggaaaaatatggtattaccttaaaaactaagaactttacggattacaaccaacctaacaaggccttgaagtcgggcgatattgacatgaatgcttttcaacactatgccttcttaaaggattggaataaggcaaatcacggtggcgttgtcgccattggtagaacctacatcgcaccgatcagactttattcacgcaagtatcataaattgagtgacttacctgatggtgccacgattgcagtgcctaacgatgctactaacgaatcaagagcactgtttgttttgaaaaatgccggcttaattaagttgaagaagggtaagaccttagttactgtagctgatatcaccagcaatccaaataactacaagattaaggaaatcggtgctgaacaaactggtcgagtattgaattcagttgacgcttctgtagtaaataatgattatgctggtcctgctggcttgactgataagcaaacgatttacattgaaccaattaacaaagattcaaaacaatggattaacattctttgtgtcaaacaaggcaaacaaaaggacaagctttaccaagatgtcgtcaaggcttaccaaactgcagaaactaagaagctaactaaggaatactatggcaatacgcaaattgcagcctgggacgttaagttgaagtaaggaggatcaaaaatgagtattgttgaattgaaaaatgtagaagtggccttccctcagaagaagggcgaaccagttaaagcagtgaataatgtttctctttccattgaaaaaggcgacatttatggaattgtaggcttctctggtgccggcaagtcaactttagttagaacggtcaatcttttacaaaaaccaactgccggtagtattaccgttgatggcactgaatttgttaaagatggcaagcaggtgatttctaataaagaattgcaattaaagcgcagaaacatcggaatgatcttccagggttttaacctattaaatgaaacgactgtattagaaaatgtagcctttgccttaaaacatgaaaagttgagtgatgaggaattagaaaaacggtcattggaactgcttgatctggttgacttaaaagataaggctgacttttatccagctgaattatctggtgggcaacaacaaagagtagcgattgctagagctttggctaataatccagatattttgatctctgatgaagcaaccagtgccttggacccacaaaatacgcaacaaatcttggacctgcttaagcgtttgaacaaaaagttccacttaacggtcatcttaatcacgcacgaaatggatgctgttaagaagattgccactaaggtcgccgtcatggaacacggcaatgtgattgaagacggcagtttgcgagatgtcttcttacatcctaagcaggatttaaccaagaagtttgttggtggatcacttgaagcgatttctactttgaattcattggcgcttgataagcttggcaaaaatgaagcaatttatcaattagtttacagcgtagctaatgtgactaaatcaatcattattgaattgtataagcaaattggcgtagaagtttcaatgctttatgggaatgttgaacttttgaatgaagagccaattggtactttggtggtattggtgaaaggcgatccagctaagcaaaagcaaacacaagaatttttggctaagcaaaatgtgacatttacacgtttagatgaaaaggggaatgtatatcatgattagtttcttaagtaaatatttacccaatgttgttcaacttggctggggcggagacgctggctggggcactagtatttttcagaccttatttatgactttttggtcagctatctttggtggcattcttggtattatctttggcgtgattttagttttaactaaggatggcgggattcggcccaataaattctggtacaatttctcagataagctagtttcaatcttcagagcgattccgttcattatcctgcttgcctttgttgcaccagttactcaaaaaattgtaggtacacagatcggaatgaaggcagccttagtaccattaactttaggcgtatttccattttatgctcgtcaggtgcaagttgctttagaaagtgttgacccaggtaaggttgaagccgcagaaagtttgggctcaactgcgcgtgatattatctttgatgtttatttaagagaatctcgctcagaactgattcgtgtttcgacggtgacgattatttctttgattggtttgactgcaatggctggtgctgtaggtgccggtggtttaggtaataccgctatttcatacggttataaccgattcaataatgatgttactttagtagctactgtattagtaattattttgatttttatcgttcaaatcattggtgacttctttgctaaaagaatgaatcaccagtctagataaaactatgatccaggaaaaatcctgggtctttttttggaatgaaattgaaaaagaaagcctttacaggtattataaatggtgattgataattaacgcaaaccttatagagcttaataaggaggaatataatatgagcgaagaagaataccgtgttgaaagtgacactattggtccagttaagatccctaaaaatgctttatggggccctcaaactgaaagaagccgcaataacttcccaagtggtgaattgatgccattgcaaattattcgagcatttttacacttaaagaaggcagctgcagaaagtaacgttgaagttggcgatgaaccaaaagaaaaaggcgaagcaattgaagatgcaattgatcatttgctagctttaagcgatactgacttgcgtaaggacttcccacttcatgttttgcaaaccggttcaggtactcaaagcaacatgaacgttaacgaagttgtagctaacttggctaataaattgcacccaggtttagatattttgcctaatgatgatgttaaccgtggtcaatcatctaatgatacttatccaactgcaatgaatattgttgccgttgaagcattggacaagttggaaccagcaattcaacacttaattgatgaattagttgttaaagaaaagaaatattggaagactgttaaagttggtcgaacccacttacaagacgcaacgcctttgacttttggtcaagaattatctggctatatttctgctcttaaacatgacttatcatatattcgtgaattgaagccaactctctacgaattagctattggtgggactgctgtagggactggcttgaatgcagcaccgggaatgaccgaaaaaattgctggtaaattatcagaagtctatggtcataaatttgaagttaaaactaataaattctggggcttagctcaccattcaggtcttgatgtagttcatggtgcccttaaaacattggctgctgatatgtttaagattgcgcaagatattcgtttacttgcttcaggtccgagagcgggctaccatgaattaaatattccagcaaatgagccaggttcaagtattatgccaggtaaagttaacccaactcaggcagaggctgtgacaatggctgctgctaaagtatttggtaatgacaccaccattacctttgcttctagtcaaggtaattttgaaatgaacgtcttcaagacagtcatcattgcatcattcttagatagttgtgatattttaactggtacaattactggttttgctgataaaatgattcatggcttaacggttaatgaagaaagaatggatgaattacttgagaattcattaatgaccgttactgccttgtcgccacatattggctatcatgctgctgctaagattgcgcaaactgctgataaagaaggcactactttaagagaagctgctttgaagagtggtaaagttactgaagaacaatatgatgaatggatggactatatgcaaatgactaatgttgataagtctactccagaagaatagggaaagtaagaaatgccaaatacaaaagaattaaagaataaatatgatgctatcgttgttggctcaggcggagcaggtctgactgctgcacttcaagctcatgaactaggtctaaatgttgttgtgcttgaaaaaaatgagaaaactggtggtaacactagtcgtgcttcaagtggaatgaacgcttctgaatctttggttcagcttgacgaagggatcattgataataaccgtgacttctatgaagaaactttaaaaggtggaggtttattaaatgaccgtgccatgttgaagtactttgttaaccactctgctttagctatttcatggttgatgaaatatggtattcgtttaactgatttgaccattacaggagggatgagtaagaaacgtgctcaccgtcctgcttcaatggaaccagttggattttatctaacttcacgaatgacaacacaggtgaaaaaagcgggtattgacatctttactggtgctaaagttaccaagttgttgcaagatgctaagaagcgcgttaatggtgttgaagttgagacaccagatggcattaaaacagttaaagctaaggtggttcttttagctactggtggctttggtgcttccaaggatatcattaagaagtatcgtccagacttagttgactataagactactaatcagccaggggctacaggcgatggactgaagcttgctgaagcacttgatgctcaactaatgcaaatgaacttcattcaggttcacccaactgcagatactgataatccgcatgtttatttaattggtgaaggtctgcgcggtgaaggtgctatcttagttaacaagaatggtcaacgttttgttaatgaattaagtacacgaaagattgtttctagtgcaattactaatttgcatgaagatggggcatacttgatttttgactcaggtgtacgggctcattttgctgcagttgagttttatgaccagattggtttagtagaacatggtactgatttggctgatttagctaaaaaaattggcgtaaatggtgccaacttagaaaagaccattgccgcttggaataagtccgttgcaactggtaaggataaagaatttggcagaacgactgggatggatcgtgaactggatcgtggtccatactttgcaattcatgttcatccagcaattcactatactatgggtggtattcatattaatactgaaactcaagtacttgatactaatggtaatgtaattgatggattatttgcagctggtgaagtatctggcggacttcatggaaataatcgaattggtggtaactcaattgccgaaacagttatttttggtcgtcaagcaggtattcagatggctaaatatgttcgtgaaagtaaataatataagaaagattatgtaaagagagcggttggttaactgctctttttcgatagaaataataacactggcgagattttgatgggatattataatttataattatggaataaatcgtgtctaatgaaagcgcttagtgtataattaatcatgtagataaaaaacagtttataaacatttgaaaggactaatttaacttatgagtagaaaagtatttcttgttggtgatggtgctgttggttcaacttttgcaaatgacttattgcaaaatacaattgttgatgaattagcaatttttgatgtagctaaggatcgtcctgttggtgattcaatggaccttgaagatattacgccatttatgggtcaaaccaatattcatcctgcagccgattatagtgatgctaaagatgctgacgtttgtgtgatcactgctggtgttcctcgtaagccaggtgaaactagacttgacttggttaacaagaacgttaagattttggaaagtattgttaagccagtagttgaatcaggatttaatggtgtctttgttgtttccgcaaacccagttgacattttgacgactttgacccaaaagttgtctggtttccctaagaaccgtgtaattggtactggtacttcacttgattcaatgcgtcttcgtgttgaactttcaaagcgtttgaatgtcccagttgctaaggttaactcaatggttcttggtgaacacggtgatactagttttgaaaactttgatgaatcaacagttgctggtaaggcactccgtgattactcagaaatcaacgatgatgttctagcagaaattgagaccgatgtgcgtaagaaaggtggcaagatcattgccaacaaaggtgctacattctacggtgttgcaatgatgcttactcaaattgtctcagctattttggacaatcgtgcaatttgtttgccactttcagctccgattaatggtgaatacggtattaagcatgatctttacttaggtaccccaaccgttattaacggtgaagggatcgaaaaggtaattgaaactaagctttccgatactgagcatgctaagatgattaactcagcagacaagatgcaagaagttttgtcaggtataaacctttaattgatcattaattttattaaaagccctagttgtcaaaaactaggactttttcttaatgacaaaaaagctagaaaatagtattatataagaaaagattaataaaaaattaaaagataagaattaacgaggtatatcatgacagttatttcacaacaagaaattgaaggcttttctgaaagctttaattctaatcctgagaataaagtagcttctcgtgctgctcgtcgtagtggtttgcttgaagcttcatttaatgaccgcgtatcagaacgacttaaccatgtcttttcaactgaacttgatattggcggtgtaactgatcagaagcattctggtcgttgctgggaattcactactttgaatgttttgcgccactactttggcaaggaaaacaaggtcaaggattttacgttctcacaagcttataatttcttctgggacaagattgaacgtgctaacgctttttacaatgcaattattcgtttggcagataaacctttaactgatcgtcatgttcaagcatggcttgagtttgccggtgaagatggtggcctttggaccatggccattaatttagttaaaaagtatggcgtggtaccttcatatgcaatgccagaaagctttaatactaataacactactgctttagccgaaaacttagctcgtaaggagagaaaagacgctcttgttttgcgtaaattagttaatgaaggcaagagggatgaagcagaaaagaccaagaaggaattcttgaacgaaatttatcgcatggtatcagttgccttgggtgaaccaccaaagaaatttgatttggaataccgtgatgatgataagaagtaccatttggagcgtgatttgactccacaagcatttgttcaaaaatactttaaggacttcaacttcgatgattatgttgctttgtccaacattcctaaccatgaatataacaaggtttaccacttgccactttatgacaatgtggctggcggcgatcaagtcaaatacttgaatgtgccaattgaatacttagctcaagctgcagtagctcaacttaagtcaggtgaagcagttagctttggtaacgatgtcttgaagcaaatggaaagaaaaactggctttttggatactgaattgtacaagactgaccaattatttgacgttgatacgcaaatgagcaaggctgatcgtttgaatactggtgagggctttgctactcacgatatgactttagtcggtgttgatgaagacaacggtcatatccgtaagtggaaggttgaaaactcatggggcgacaagtttggtcacaagggcttctacgaaatgagtcaagcttggtttgaacaatatgtttacgatgtgattgtgaagaaggaatttttgccaaaggaattgcaagagttagttgatcaaccggctgttgacgtaatgccttgggaaaactttggtgaataagatcaaaataacaaagatcaagtaaagagaactggtttaattagccagttctctttttttgcataattatttgagtttaaataattcaaaaaataagtaaaaaatcaaaataatttaaaatttgtaaccgcttaatctattgataagtgtataatactaattgtgagttgtgatgagttttagtttttataaaaaggcttgtttaacaataacaagatagattagggagcataaagaggggagagctactctatgcctgtaggaaaaagaatttatttaaagaggcaaatgcctgatccaaaagttgtagctggttttaaaaagatcccagcttctaataccgcggattgcatggaacgaaattgtgctatgaatcctagaattaagttaatgtcgaatcctgatgaggaaatggttggtccagcatttacggttcacaccagggcgggtgacaacttagcaatttatgcggctttaaagtattgccagccaggcgatgtgattgtcatcgacgacgagggtgataacactagatctttgattggtgaggtaatgatgtcttacttacgcgatcaaaagaaaattgcaggtattgtaattggtggcccaattcgtgatattgataatttaagaaattggaaactgccgatttatgcaaccagtactaccccaggtggaccatataaagaaggacctggtgaaataaatgtacctgttgcttgtgggaatgttagtgttaacccaggtgatgtgattttaggggatgctgatggagtaatttgtattccacgtaaagatgctcctgagattttgcctaaggcacaagcttttcatgagcaggatgaggctaaagcaattgcctttagcaaaggagaagttgatttaagttgggtagataaaagcttagcagataaaggctttgacatcattgatgatgtgtatcgtccatagagaataggggattcttatgaaaactttagaaaaagtgaattataaaggctttatttggcctttgatcgttggaattgtattgtggtgtattactccatggcgtccaagtggcctttcggttcaggcatggcaaatgtttgccgttttcgttgccacaattgtagggtgtattacaaaacctttgccaattggtggtacaaccttagctggcttggtagtaactgttttagttggcttagcaccaatgaaggacgttacaaatgcaaaaggtatggtagttaatcaaggcgtgcttagttcatttggtaactctgctgcatggttaatcgctatggccttcattatggctcatggtattagtaaaacaggtctaggtaaccgtattgcctatattatgattcaaaaatttggtaagaagtcgttgggtattggttatgcgattactggattggaattaattctcggtgccttaattccatcgaactcagctcgtacgggtggggtcgtttggccagttgttgaatctgtttcaaaagaaggctacgattctaagccagatgatgcttctcgtaaaaagattggtgcctacattgactttactgcctttcatgccaatattttatcaacggctttgtttattaccggtgctgctcctaacatggtggctcaacaattagccgcacaaaagggctatcaaatgtcttgggcaggttggtttttcactgcaatcgtacctgttgctgtattggcagtaatcattccatttgttatttacaagatgtacccacctgagattaaagaaactccagatgctaagaaatgggctgatgaaaaattagcaaaaatgggaccaatgtcaactccagaaaaaattatgatgtcagtcttcattctttcaattgttttatgggttttgtctggtttctttaagatcccacaattagatgcgacttttgttgccttcctggctgtaactattttgatgattaccggtgtgttaacaatgcaggatgctctgaaagaaactggtgcttggaatatcttgatttggctttctatcctgatgttcatggctggtaagctgatttcatacggatttattgattggttctccaaattagttcaaaatagtcttcatggtgttagctggggctttgtattggcaattctagttttgcttttgttctacacccactacttctttgcaagtggaactgcacatatgactgctctttatttgccattcttgtctgttgcggttgcaactggtgctcctttaggcctttccgcaatgcttttagcctttactggtgcaatcaacgcatcaaccactcactatgctaatggtcctgcctcaattttggctactactggctatgttaaacaaggtgaatggtggaagatgaattttgtccttggattaatctatatgattatttttggaactgtcggagttctttggatgaagattattggtttatggtaaaaaataagcaatctggaatcaccaggttgctttttttgcgtcataatagaattgagtaatcaaaatgaaagaagattaaagatgaaatttaaaactaatgacgatgtaattttgcattataccgatacgggggatgaagataagcctgctttgattgggatcccaggtatagggggatcttgtcaaatgtggcaagatttaattgccttatttaaaaatgattatcgttttattatgcttgatccacgcaatcaaggacagtccgaacgaacctatcgtggacagcggattagtcgtcatgcagttgacttagaggagctattagttaagctcaatttgcatgatgtagtagctattggaaattccatgggggctgccaatatttgggcatatttgtcaatttatggcaaaggtagactaaaggcaatggttgatttagaccagtcaccaaagatgattgcggataagagctggaagtatggctttaaagacctaacttgggataattatcctgacatgcttaaatttgattttggcaaggcttgttaccatcacattgatgaaaaaatgtttttggctgctaaaaaagaatatcaagaattcccatatgatccagccgaaaactataactgtttagttgaacatgcggagcaagattggcgtgacatgattttggatacgccggttcccatgctggtaattgctggggaaaaatcgccattttttaatccagaatttacccaagcgataaaaatgctgaatcaagatgttcaaacggcgattgtaccggaatgtgggcatttgcctcaggctgagcaaccagaaaaaacgcatgagattattgctgaatttttgaaaaatttaaaaaattaatagataaattgaaataatcaaactaagagagtaaactatatttgtgaaaacgattaccgaaatagtaaggcggcatatttatggataaagtcgttgatttgtttttaaacgacgctacaactaggcaaaaatgggaaaacttgttggaatcattggggttaaatgattttagtgaacgcgaagttaacgtgattgatcatactattgggctagaagatgaggaaggcaatttagttggtactggtagtgtggctggtaatgtcttaaagtatatcggagtcaagaatgatgccgatacgcagggggctcgctttaataaagtggttacagccttaacgcaatatttgactaatgatggaattttccattcctttgtctttactaaagcaaagtatgcaactagctttgagcacttgcacttcaatttgttagccaagacggatcaggcagcctttttagaaaatggaacgcctgatgtgaaggaatttgtggctgaagtgcccgaaatagcagatcaagagcataagaaggtcgctgcaatagtcatgaatgcaaatccgtttaccttgggtcatcagcatttgattaagatggctagtgaagaaaacgatttggtttatgtctttgttgtggctaatgatgtttctttgtttagctttgatgagcgcttcaaattggtgcaagaaggtactaaggagtttagtaatgtgaaagtaatctctggcggagactacatggtttcaccagctacttttccagcatacttcttaaaatcacctgacgatttaattgctgtacaaacggtgatagacgcagctgtctttaagaatcaaattgcaccaggactgaacattacccgtcgttatattggtaaagaaccaatttcaagaacgactcacttttataatgttagcctagcgcatgagcttggtcctgagattgaagtaatcgtaattgatcgcttggaaaaagacggtcaaattgttactgccactaaagttagacagctgatcaaggatggcaatttaaaagagatcaataaattcgtgccggaaacgacttatgaatttattaagcaaaacatgcagaaattgcagtctaaaattgagaaaggaatgaatattgatggaaattaaaaccacagcagttgcgggaacacttgagagttcagatatccaaatcatgatttcaaagggttctaacggcattgagattgaccttgaatcagaagtaaaaaaggcctatggagatcagattgaaaaggtgattactgacaccttaaaagcttatggcttagaaaatgccaaggttaaagcaaccgataagggagcactggattgtgtaattaaggctcgtactttagcagctgcacaacgtgcaaccgaaacttcagacaagccagatttggaggtgctctaaatgccatacgttaagaatcgtttgcgtagaaccatgatgtttgtacctggtaataatccagctatgattaaggatgctggcatttatggtgcagattcgattatgcttgatttggaagactcagtttcattaacggaaaaagatgctgccagaatgttggtttatgaggcaattaagacagtcgatttcggtggcagtgaaattgtagttcgtgttaatggtcaagacacgccattttacgatgaagatgttaaggcaatggtaaaagccggcgttgacgttattcgcttgcctaaaactgaatcagctgcaatgattcaaaaattggtaaaggatatcgaacattgggaagatgaatttgacattgaaaatggttctattggcgtgatggctgccatcgaatcagccaagggtgtcttaaatgccccagaaattgcaaccgcaacgcctttaatgatgggcttggcggtatctggcgaagactatactgcagatatgcatactcatcgttatccagatggtcgcgaattggaatttgcgcgtaacatggttttacaagcagctcgggccgcagacgtatatgcctttgatacggtgttctcaaatatgaaggatactgaaggcttctatcgtgaaactaactatatccatgaactagggtatgatggcaagagtttggttaacccacgtcaaattcaaatggttaataaggtctttaatccaactaaagaagagattgagcaagctaagaatgttgaaaatgccattcgtgaagccaaagctaagggctcaggcgttatttcacttaatggtaagatgatcgataagccagttgtagaaaaggctaccagggttttggaaacagcgaaagcttctaacttgattgataaagaaggtaactacattggagaataaagtaaaacgcgaattaccagatgatttaatgaaaaaaatgaatttgaaaccatttgaaactactgaaattggtcatcctgaagttaagcgggttgctccaaaggtaagagttactactggacaaaataagattattgattcacttgatgaggtaatcaagaataacctgaaagatggtatgactatttcattccaccaccattttagaaatggggattatgtttttaacttggtaatggacaagattattagtatgggttaccaggatttaaccttggctccaagttcacttactggtgttatgaatgataaagttatcgaagcgattaaaaagggagtaatcactaatattacttcttcgggtatgcgcggttcactaggtgattttgtttcacatggcggcttgaagaatcctgtaattttccgctcacatggtaatcgtgctcgttcaattgaagaaggcgagattaaggttgatgttgccttcttgggtgtgccagtatctgatcccgcaggtaatgctaacggtcaagatggggatgctgtcttcggctcattgggctatgccctaatggatgctcgctatgctaataaggttgttttattaactgataatattgttgattatccaaatacgcctgcgtcaattcagcaagatcaagtggattatgtggttaaaattgataaagtcggagatccagacaagattggttctggtgccactcgctttaccaaggatcctaaggaactcaagattgctcaaatggttaaccaggtaatcattaactctccatattacaagcaagggtttagcttccaaactggttctggtggtgctgcattagctgtcaccaggtacttacgtcaaagtatgattgatgatggcattactgcatcatttgctttgggtggtattactaaacctaccactgacttacttgaagaaggtctagtcagaaaagttatggatgtgcaggactttgataagggtgctgcccaatcaatggctaacaataaaaatcaacaagaaattgatgcttcttggtatgctgatcctcataataagggtgcagtggttaacaacttggatgtttcaatcttgtcagctttacaaatcgatactgacttcaatgttaatgttatgactggctcagatggtgtcattcgtggagccgtcggtggtcaccaagattccgcagctggtgccaagatgacgattattacagctcctcttgttcggggacgtaatgcgactgttgttccaagagtagaaactattgttactccaggttcatcaattgatgttttagtaactgaaagaggaattgccattaatccagctcgccaggatttagtggatgcctttagtaaggtgccaggacttaagatcttggatattaatgaattgcaaaaaatggctgaaaaacaagttggtgtaccaaagccacttgaatatactgatcgtacggttgccttagttgagtatcgtgatggtactatcattgataccattaaggaagttagggattagttcaaaacgaaatgtatgaataagtaatcacaaaggtgtcacgaaagtggcatctttttgtttttattaaaatgttaagttgtatttttgcaagaaacgttttttaattatttgtgcaaatattttattttcaagcataaatatttgcaaattctaactacgatgcagtagtaaagtcacatcgcaatatcggtcaactaagaagaaccagtgtaggtgaaatatctgcactggttctttgcgtaaaaaaacacctcgttttaagaacgaggtgcgcgtatacatatatttttctgagtaattttattatgacacaaattagattgattttcacttatttagactcattattttgttttgatgaatatttttgttaaagtgaactaatgctaatgattttttgaggggagataaatatggaaagttggttatttctagcattggtgctagttgtagcgttattgggtaaaaacatgtcattaattattgcaacgggagtggtaatggtgtttaaattattaccgtttactagtaaatggctgcctactattcaagcaaaggggattaattggggcgtaactattatttcggttgcaattctagttcctattgcgacaggacagattggctttaaggatctgattaaaacttttaagtcgccagctggatggattgccattttagcgggaattgctgtagctatcttgtcacgttatggtgttgatcaattagcagcggtgccacaggtgacggttgcattagttttaggtactattattggagtagtggttttcaagggtgtagctgcaggtcctgtgattgctagtggaatgacatacttagtaattacgctgtttaacctacatttttgaggtataattatgaaaagtgaggcgatttaatgattattgtacatgaaaatacgcaagagcgattagatgactatcttgaacaccgtttgcataattatgaaataatcacgccgccgattcctaagaaacctgagattgtcactcaagatgatcataaacagaaaaatcgaaaaccaaaaagggaccattaggtccttttaattttggtctaaataaatggattataaaatctaccatgatcaagttgccagagaccaaccacaattaataccaaaatcacggctgcgatcattacaagataatcagcttttttaaatgattgggtgacataccaggtccgttttttctttgagccaaagcggcgtaattgcatggctgttgaaattgtatcgattcgatccaaactggagaagataagaggcatcacgatattcaatgtccccttaattcgtttgcctaaactagcctttttggatagttcattgccacgtgcttgttgggcagctgagatatcccaataagaattttggatatctgggatgtagcgtagagctagagaaacagcataggaaattttgtaactaatgccgattttatttaatgaagcagcaaattgactaggattagtagttaatagaaacagcaatacgattggaattgagcagacatattttaagaaaagattgaataagtagaatacctcttgcaatgttaatgtgaagtagccggcatggatcaagatgcttttagaatgataaatattttcaccatagcttggctgaaagatgaaaacaaaaatcagatttagcaacatgaaaactacaataaatttcacgataaaagaaatctgactccacttaatttttgcctctttaaacaagaaaattgataaaatacagatagcaattaagaatctggtatcataagttaccatacaagcaaccgagactaggagcataaaaactaacttagtggttgcgtttaattgataaataaaagaatcaccaggttgataacctaaaacttggctttcattatgcatgtttttcatctctttctgcatcaatataggcgcggacaaagctatctggattttctaattgatatttgatagcgagattatataaggaggttcgcttcaaagcagcctttttaattaaagctttttcagttaataacttgattggatctgtgtcagcaattagtgttccatcagcaaaagccagggatctgttagtgtattccatcagcaagtacatatcgtgagtgataatcataattgttttgccttgatcattaagctgttttaaaaagttcatgatctcagtataagtttgccaatcttgccctgcagttggttcatcaagaattaataactcaggattaagcactaaaattgcagcaattgtgactcgctttttctgaccgaaggataaagcagagattggccagttgcggtacggataaagaccacaaactttcaaagtatcatagaccttagtgcgaatagtctgctcatcataaccacgtagacgcaagcctagagctacttcgtcaaaaatcattttttgtgaaatcatctggttaggatcttgcatgacataaccaatcttatcggaacgctctttgattgaaaactgcttaaggttatcaccatcaaataaaataagtccctcattgtcgataaagccacaaataattcgacaaagggtggtttttcccgcaccattttgaccaactattgaaacaaaatcgccttgattgattgtcgctgtaacgtcatgtaaaggatgaatctgcaatttgctataacggtggccgacgcccttgagttctaatagaggatgagtctcttctttttcaccacttagggtaatgttgttttgccattcttgcaactgcttagcaatttcaggatcttggggcaaagcagcgactgaagttaggtcgggaatatgcgtaaggtcgacgttagctttttttaaggcatttaaataaagaggactacgaacaccaacgtcttctaaacaattctcatgtaatagatcatttggcttcttatcagctataatttcaccatcattaattaggataatgcgatctataggctgactcaaaacttcttctagacggtgttcaataatgattactgtcgcatttaattctttttgaatgcgatcaattaaagccatcgttttcattcctgaagctggggttaaattagcaagtggctcgtcaaaaagtaaaattggtgattcatcaaccatgacaccagctagagcaacaatttgtttttgaccaccagatagattttgtggcgcctgctttaataaatgctcaatccctaattcatcagcccagcgatgaacaacttgtttcatatgattttgtggttggcagtcgttttccaaagcaaaagcaatgtcttcaccaacagttaagccgataaattgactgtcagtatcttgtaggatagttgaggtggtgaaagaaagatcaaataggttagtgtctttaatattcttgccgttaatagtgcattcaccggtgatctcaccagtatctagattaggaattaggccgttaatacagcggccaatggtcgatttacctgaacctgatggtccagcaattaacaatttttcaccttgtttgatagttagattaatctgttttagtgttggctcggcctgactgtcatacttaaatgaaaaatctttgaattcaataattgttttaggcattgtttaatcctccttgcgcaagctgccttttttaatcttggttccagcataagctttaagtaggagcgtgccaatgaccataattgtaataccattagaaagcgtagccgaaattccttggacaaaaactttgttagcaggttcgctatagatgataatgtcaccgattggtgcaactacaatccaggcgagaatattggcaataatttgaatgatattaaaaaagattatttgtttaataccaaaaataccattttttaagtctaagcgtttggccgctaaaccgatgatccagcctaaaacagcagtagctaatacccagctccaccaagtctgcccgtacataatgaaatcggacaaagcatgtccaataaagccgacaataaaaccgaccttagcgccatagattgacgcaaaaagagccaaaaaaggaaagactaattcaatatttgtgttaggaataggcgtaggaatcgatgtgaaacgtgctaaaataacatagattgccgatccaattccgatcgctacaacatttttaactgataaacccttagtatgcatatttttctccaaaatttagtatatttacaaggtataattagtaagcggtaacagtcaagctgattgggagattcaatctatttaataaatttgtagaagaattactaagagggtatccttatattaaagaaaagaatttataaattagaggtaaaaaatgaagcaggatgaattaaagaaaattaaccatgaaataggttcgtatgttgctaaggtaaccaagacaatttgggttgacgataggacattgcagattgccacaatgatgattgattcttatggcgataccgtatatgtttgggttgaggaagccgatgatcattgccgcgttagtgatggcggacgaattctatttaagctagatcctaatgaagaagataaagagttatatgaaactgcggaagatattgcgctagggtcaggttatgaatttgatgaaaaacactgtgaaatttttgttgatgttgatcgcaagaatgtggctcaggcggcaatgaagctggcacaattacaagtagcaatttcatatttaggctaaaaaaagacatccctaagttttctttgattagggatgtcctttatttttaagtcatttcgaaaaactttagacatttgccatccttcctaggttcacatcttgtggctttttaccattgaggtcaaaatttgcaattgcttgtgctaaagccatcattgatacaacatctggaatacattcatcaattctaaactccataatgctcacctcccagtcattgtaaatccaactttagtaattgttaaccagtacataacaaattttagcatagaaaaagcagccaatttttggctgctttttctattttttattgctatgttgcataaagataaagaaggcagaaataatattaacaatcacagcaggtaaggctagagcagcggtaaagccatatagtgcattaccaattactcctaaaattggcccaattggtgagatattcatgttatgcgattgcactactgcaacggcattaaggatcacgccgaaccaggcaaataagtaaaatattaaagctattctagcagtgaagtcagctccaaggatggcaaaccaagagctaatgaataacacacaattgatcaggttcagtgcaccaatccataaatcatatttagattttttcattttttctcctcattataaatagtctatctctgtattactttagcgaattaatcgatattttgcaaaacgcgttgggcaattgcatcattagttactagatgagtaatgataccgctacgtaaggcgccaaggagtgcctcagatttaaagcgattgcggacgacacaaaaacgaattggcgttttcataatgtcattcatgctgataccacaaatgtgttgttcgaagtcagggaaaaattcacctttaatattatatggtcgtcccatgatcattccagctacatcgcagtcaggaatgtctttaaatagttcaggtccataattttctttcaaaaattgattagcttgaaatgattggaaagtactaagaccagtgaaaagcatgtctaagtgatgataacaattttcaattactttaaaataaggctcatgtttcaaggcaggcatgatctttggatttagtatataaagtggggttggcagacttagactatgggaatgcaatttttctgctgcatcttgggccaatggattcttcctgcggttagaattaattggttgaccaagtaattgaataaagtaaagttgctctaagtcctgctcaaaaaagtcgttgatcacgccatgcattgttgcaccccaactaataccagcgatttttgcttgctttagataggtttcaatttgtttagcagcgaagttaactacggcttcactattttcatcgcggttgccggtagtttcgacaataaaagcttcttttaatctgaatcttttctgaaattctctctctagtacctgattgcgtttgattccacgcgagattttaattttaacaattccacggttacgcgcgtcttctagtgctttagcgattaaatatcgcgataaatcatatttttgtgagatatcagcaatattaagctgactaaggtaaaagtcatgagcaatgttagcaagttgttcatcagttaattgagccactttaaatcatcctttatttcaaaataacttatatgtctattataaatttaaaataataaaaaggagcagcaaattttaaaatatcaaaaattatgatgaagttcctgtggtagaatataatggttataattatgcgaactatgtgagggaaagtaataatagcatgagtgaaattgatcgagaacatcatttatcagaaaaacatcatatgaagattctgtgggaggaatttttcaagagcgataataatacgatggcgcaggatgcaacattagttgaaaagacctcgattgtaggtcgagtaggtattatgcttttaagctgtggtacaggtgcttggcgagtacgtgattcaatggatacggttgccagaaccttgggcattacctgttcaacggatattggattagtgtcaattgaatatacctgttttgatgttgataatgaatcatattcccagactttatcgttaccagcaacaggtgtgaatatgactaagttgaatgaaatggaaaaattcgttcggcaatttgaaaagggacatggggaatggactatcggtcaaattcataaacgcttacgggagatttctcagcaaaagtcagcgtattctccgttaatttcgggacttagttcaggcttggcctgcggcggctttattttcttattaggcggcggtcttcctgaggtgatctgtgctttcttgggtgcagcttgcggtcaatatattagagcaattatgggtaagcacaggttaactttggtagccaagattgcggttgcggttgccatagcctgcagtgtttactttatgagttttcatgtaggagaaatattattccacattaatcatgatcatgcctatggctatattggtgccatgttgttcgtaattccgggttttccatttattacatctggattggacatgtctaagttagatatgcgctctgggcttgaacggctgacttatgcgattttaattatcgtaattgcaacgatggcaggctgggctgtagcaacaattttgcgtttgcatccaggatccatgcctaagttaaaaattgatccagggactttaacctgcttgcgattgctggctagcttttgtggggtgtttggtttttcaattatgtttaacagtcgaccacaaatggcagctacagccgcggtaatgggagcaatggcaaatacattacgtcttagcttggtcgattatgctcaggttgctccagctttggcagcatttattggtgctttaacagctggtctattagcaagtattgtaaggaaaaaagttggttttccaagaattgcaattactgttccatcaattgtaattatggtgcctggtctttacatgtatcgagctgtatttaactttggaatcacgaatattaatatcggagcttattggatcgtagaagcgttgatgattgtcgtggccttgctattaggtcttttagctgcacgtatcttaactgataagaagtggagacatgcagattaaataaattaaggtagaaaaaagagacggattttttgtctgtctcttttagtttgctattgttaattaatcatgctttctttttgtaatagtaaatcccagtagtcctagtgctgctaaagctagaccgattaagctcaggttagaattattttgactagtttgtggtaatttagaactaatattattgtaagacttaacgatattattagtagttctagtctttgttgttgaatttggaatattattaatggcagttccatggggtggaataattccatctttgtgttgcttctgtctttgcatatcagtgccataaggatgactgctagaattccaatttacttttttgtgaatctttgtctgtttgtattcattagacttaggtggttcagacttatttggctcagaaggctgcttcggttgttctggagtagtcggagtctcagattcaggtgtaggaataggagttggggttggttccggtttagaagcggagtaactatagggtacccaaatgctaatagttgctagattgccagttgttgttttttgaccattaactgtggtagaagcaattgaagctaaaaactccgaattaggtgcaattgcggaaatcccagtaattgaattgcttgtagcagtaagtttattctgtgaagaagcaatgtgaaccacgccatttttatctaaatgataatggccatcaattatgtctttaattgtagtattgttatacggaatagctgaaaatgcttgattgtttgatattcattgtgaccagtttgtttctgtgccttgcggatccttaactaaatcaacaaccctgcttctagagtaaataacttcttttactacatttggagtaggtgtttcatcatttttaggaacagccacatctggattatttataccggaaaagttttggctcttaagaccgtttacatagtagccttttacttcttccctaactgtagcagtttgcttttctatctgcgtttcatgaactaagtaaatgatgaagtgttgatctacattttcattattatcaaagttgccaaagccgatactgctgtccgtttttaatgtggcattggcgccagaaactttttcaattttatagtgcttatttttaaataaagctaatgcttcttctaacctgctaaattgaataggggtattagctgattggtcgtctttattttggtaatcagcactaagcccttgaccagcttcatcactagtcattgagagttgaaacccattatcgttaagtagtttattgattgcttgatcggttttatcagtgtcatcataaaatctgacatctgcatgttgagttatgtagtagggaatagttaattcatagtgagtaccgtctggagttgatgaagcaataatgaattggtgttgattattgagtctaattttatcaggagtaacaatattaactaagtctgctacatattttgcattagcgtttttattaggagaaactgtgacagtatatgcttgggctaaagcgttccaagttttgccattatcaatagaatattgagtccagctttggcccgaatcttcagatttaagtttgagcatgacttcatcagatgcaaatggagtgttagatttttgacttccgttagcgtagatatggttaattacgtagctaatagttttagtttgttcagtttcactgtcagaactacctttaatttggccgttccatgagaatgttttggtctctttaagcaatccttgaccagccattaaagaagctgattcatctttttttatttcggaagcgttgttacctttttcatctgtatgaaaagcggtaatttcgactgtttgttgttttgttttttcttggtttggtgaatctttagctgaactttgattattttggttacttggatcagcttgagttgactggatggtattatttgactgttcttgattagatttttgtgaatcttgttgagtttgttcttcattagtcgcagtattagtatccgcatgaacaagttgactattacttaagaaaaaagtagtgctaagtgcaactgcagctaaaccaacagacaactttctaaaaccaaatttttgttttccattaaattttgtattgaagctcaaatcatttttgtgtttaatttatctaaaccttcttttgggaacgtaaaagactgagtcttttacaatttattatcaatgtgttctttttacatttgacaacatattagattagcacaaataaataacattgctgatataaatttgacttttttataggcaaaaactttctttttagtataaatagtttagccttatatattaaatatttataatttgataataaataactattatatagaaaataaaaaatggcatgatatcaaaccacgtcattttaaatctgttattattttttcgctttatttacttggcaattgctaatgccgtaacaacaaaggcagcgatcatggtaactacaaagccaataattcctaacaatatattcatttttgtcatcttcttctatgtaattgctgaaacttgaaagctaagattaacgctccttccccgcgcctcttggctttttcttatcaaaaataaaaacgcaggctctctctgcgttatactttaagtgtcgacctaaaaagtaaaggagatcctgcgcaatgaacagtatagaacaaatcgacacagaaaatgatactaaatccttaatttcttcatttattaatctaattggtctagctaagttaactaaacaagtcaattttaagcgtaaatccaccgtttcattaaccatgattatctcttggctgatgtcagtacattttgctcggctttctttattcagagctaaggatgacaaacgtttttccgttagaactgctcgcaatgtacttaacgatggaagaatcaactggcaaaaactattatgcttgattgcagcccggctcattggctgcttaaaaccatttatcgataaaagacgccgacttgcttttatcgttgacgatacgctgatggctcggtctttttctaaaaagaccgaattgctagctaaagtctatgaccatgacaagcatgagtatttgaacggatatcgtggtttaactttaggctggagcgatggcaataccttcttgccggttaactttgccttgatgtcaaccaaaaccaagaaaaatatgattggagctgctcccattactgctgatgaacgttcaatttctggtaaaaggagaaatcaagctcagagaaagatgaatgatgtaactgtagagttgattagacaagccttacgattaggagtagaagctaaatacgtcttattcgattcttggttttcttctccaagaatgttttggattttaaagaagatcggtttagatggacttggcatgatcaagaagagttcaaagatttattacatttatcgccatcgccgctatagcgttaaagacttgtatgatcgttttgctgcttcaaacatccgtaaaaagaaacattatctttattcaagcatagttgatgctcaatatcatggacatagctttttattaaagctcgtctttgtctccaaccgtggaaacaagaacaagtatttggttttagctactactcagacaaagcttagccctgaagaaatcatccaactttatggtcgtagatggcaaattgaaacatattttaagacgtctaagcaatatcttgctttagataaatctcaagttcaaagctatgatggccaatgtggctatatcgcagttacagcaataacttatgatctattgacctggcaggaaagacaaaatacagatgataagacaatcggagatttattctatctaatgaacgaatccttacctgatattagattcgtagatgcattggtctacttaatttcagaattaaaagagcttaaacagaatagttttgaaaagatagatgaagtaatcaatgactttattaaccaactgccacgattcatacaaattgcactgaaacagatcatataaaaactaattacgtctaagaaagctcaatagtgacaggacttgagcttgattttggtgctttcaattttcaggtaattgttatattctgtatgcggtacatatatttactataacacaaaagaagaagaataacgcaataaattgtaagcgctttttattcttttagatcaataaaaggagcatggcagaatttggctaagtcttctgggttcaaaaagacactgcggccaacttcaccactagaaacaccaatttcaggatttccttgcatagagtcatccaaatagataggaaacttttccttaaaataaattccgataggagtattagcgccatgtacataaccagttgttttggctaatttctttaagggaagcatttcacattttttgttaccagaaactttagctaattttttcatgcttaaatgttcagtaactggtacgacaccaaccaatggaccagttttatttccttcgcagacgagagttttatagactaaacgctctttgtcttctaaaatagaagtgttcatttgtgcaactccgcctttatcttcggagacagcaaattgagcttgacgatacttgattttattttggtctaagattttttcgaccaatgttttttcgagtttgttctttttatttttcttctttgacatatttatcacctgttatcatgatagcattatgccaagaaaatcccaaaggagataatattaatgaaattactaattattaaaattgatactagtcatgaagttgaagacgctttgagcgtttttgctttagataatctgaatgcattgggtattgaatcaagaaagcgtagcgactttgagcaagcaggctggttgcatgattctactgtagttgaaatggatgacattaaagacttacctaaggatacatatttctatgcttattttgatgaagaagcagataaagacgcattagtaaaaaaattccaagataagttaaaggaattgaagagctatggcctagatgtaggggatgccaaaattacaacttcatacattaaggaccaagattggaacacggcatggcaaaagtattatcacgtgattgatttttcacgtcacttggcaattgtgcctgaatgggaagattacaaacccgcttttaaggaccagcaattaattaagcttgatccaggcttagcttttggtacaggaaatcacaaaactactcaattagcaatgatgggcctagagagagcaatggttaagccaatgaatgtagtggacgttggtacagggtccggtattttggcaattgctgcatcaaaattaggagcaactgacgttttagccacagatatttcagatgaatcaatgactgcagccaaacaaaatgcagccttaaacgatattaataatattcacactcaaaagactagtttgttagctgatgttaaaggcaagtttgacatcattgttgccaatattttggcagaaattttactagacttgattccacaaatggatagtcatttaaacgacgatggtcaagttatcttttctggaattgactacctgcaattgcctaagattgaaaaggctctagacgagaatggctttaaggtcgatttaaccatgcgtcaaggtcgctggattggactagcaattactagaaaagaaaaataaatatggtaaaatattatcaattaaattaaactttgatgagaggcacaatcttttaatgaaaaaactaggaaataaaatcgaagcaattccaattgtcaggaagttgaattctcatcgctggatgtcacttgtctggtggagtattttggtaatgattttgccgtatatctttagcatttgccgtgtgccggtagtgtggcgagaagcaattctgttttttattattaacagcatcattgcataccatctaggcaatttatttattaaacttaacctgtccaagtggtggattttcttgttacctgtgcttttctgcttagcaatgttgccacattttgctttgtataatttaatgtttggtttaatttacttaataattgaagcttttggcttaatgaataaaaatatttaccgctagaggggatgatcataatgtccaaatacattgaaatgacgcatgatcaggtaattgatacctgcaaaaagtatatgaatgatgaccaggtggcctttgttgaaaaagcatatgaatttgccaataaagctcatgctggacagaaacgggcgtctggacaaccttatattattcatccaacgcaagtggctggaactttagctacattaggcttagatcctgatacagttgcagcgggctttttgcacgatacagtggaagataccccagttacaaatgatgagctgaaggaaaaatttggtgaagatgtagcttttattgttgatggtgtaaccaagttaaacaaatatgagtacaagtctcatcaagaatttttagctgagaatcaccgtaaaatgttgattgccatggctcaagatctacgtgtaattatggtgaagttagccgaccgtttacacaatatgcatactctgcaacacttacgacctgataagcagcggcgtattgcttccgaaacaatggatatttatgcaccgctggctgatcgtctaggtattgggacaattaagtgggaactagaagatatgtctttccactacttaaatcccgaagcctattaccgcattgttaacttgatggatgtcaagcgaagccagcgtgaaaaatatattgccgatacaatcaagactttgaagaagactctaaatgaattaggcattaaatatgaaatttatggtcgtccgaagcatatttattcaatctataaaaagatggttaataagcataaagattttgatgagatttatgacttattggccgtacgtgtaattgttaaaaatgtgcgtgattgttatgctgttttgggtgctgttcatactgaatggaagccaatgccaggtcgttttaaggattacattgctatgccaaaggttaacggctatcaatcactccatacaaccattattgggcctggcggtcgtccactagaaattcagattagaactgaacaaatgcataaagtagctgaatatggtgtggctgcacactgggcttataagcgtggcaattttactggtgttgagcaaagtacctctggtgaaaagctggatatggtaagagaaatccttgaattaaaggatgaaactaaagatgccggtgaatttatgaagtctgttaaaagtgatattttttcagacagagtttatgtttttacgcctaaaggtgaagtatatgaactacctaaaggttcggttacgctagattttgcctatgcaattcacactcaagttggtagtcatgcagtaggtgccaaagttaataacaaattagttcctttggactataaattacgcaatggcgatgttattgaaattatgacacagactaatgcagcgccatcgcgtgactgggttgacatggtgaagacttcaagagcacgcaacaagattagacgctacttcagaagtcaggatagagaagatagcatccagcatggtgaacaattgattgctgatatgttgcgcgatgaggatctttcacccaaagaatttatggccagggatcgaattgaaaagctattagagcactttaattatcacactgcagatgaactatatgcggcagtaggctttggtgatctttctgctcaagcagtggttaatcgcttgacggttgatttgcgccgtgaggaagaaaatcaaaaacaaaaagagctggaagaaaagattttgaattctggacaacaagcagttcaagaagaacaacctaagaagaattcaaatactacaatgaaggttaagcataaaaatggcgtcatgatccaaggcgttagtgacttaatgcttcatttagctaagtgttgtaatccagttccaggtgacaagattattgggtatgtaactaaaggtcgcggtgtaactattcaccgaacagattgccgtaatatcaccaaagaagctgaagaacaaggtcgcttaattgatgttgaatgggaaaatgttgaggaaaatagtgttcaatcctttaatgcaaatattgaagtctttggttacaatcgttccaatctgcttagtgacgttattaataagttgaattcacttactaagaatattaataatatttctggtaaagtaaacgaagataatgttgcacatatgtatgtcacagttgctgtacggaatgcagatcaactagatgaaattttgagtaaattacgtgatattccagacgtatacgaaactaagaggtcagataattaatgcgagttgtaattcagagagtaaatcatgctcaagtagatattgacggtaaaactgtgggcaagattggtaaaggctttttattattagttggcatcaaaaatggtgatgaattgccagtaatcaaaaaagcagctgataaaatagctaaaatgcgtatttttgaagatgaggaggggaagactaacttgtctttaaaggatgttaacggagaaattttgtcggtatcacaatttacgttgatggcaaatactaaaaaaggcaaccgtcctagttttgttgatgcgatgcgtccaccaagatcgaaagaactttgggaagactttaatcaagaactagaaaatgacggtttccacgttgagactggtgagtttggggctgacatgcaagttagtttagaaaacgatggtccattcacgattgtgttagatctttagcgaaaaaatgagaccgcaaaggttgacaatgtcttgagaaaaatataagctaagtaagaattatcgatgacaaagaatgtagattagcaatgatctattcaaagagactgctcgttgtggtgagagagtagatagatcgcggtctgtgacacctttaacagataatggatcgtttggcgagcgttaatcgcagcaaccaaaaaggtggtaccgtgctaatctaagcgcccttgattaagttcaagggcgctttttatttttaatcaagttatcaaaatataaaaaggatgattaaatgagagttcaaaaacctaagggaacagttgatattttgcctgatcaatctggttcatggcaaaaagttgaagaaactgccagaaatttcttcaatcgcgcaaattatcgtgaaattcgcacaccaagttttgaaaattatgaaatctttgctcgttcaagtggcgatagttcagaaatcgttgaaaaacagatgtacgacttcgatgataagggtggtcgccatattgcccttcgcccagaaggaacagctagcgtagtgcgggcttatgtagaagacaagatgtatgcgccagaagttgttaagccatttaatgttttttatatggaatcaacttttagatatgaaagaccacaagccggtcgtcaacgtgaatttcaccaaattggggtagagagctttggctcaagcaacccattaagtgatgtacaaacaatcatgatgggacatgatttattgggtgagttaggcgttaagaattaccaacttcacattaacactttggggaatgagcaagtacgtcaagattatcatgatgctttggttaattatttcactcctttgaaagatgagttatcagaagactcacaaagaagattgcgtgataatccattgcgtattttagattctaaagatgaacgtgataagaagttcttgcctaaggcacctaagattcgtgaatttttggatgacgattcaaaagctaattttgaagcaatcttgaagatgctagatcaacttggtattgattatgtaattgatgatgatctagtacgtggacttgattactatactggaattatctttgaatttatggttgaagataagagcttatgggaaagtgcaactactattcttggtggtggtagatatgatcacttggtagaagaattcaatggacccgctactccagccgttggtttcgggattggcgaagaaagattgatgttggtgcttaaaaagcaaaatcctgcattattcgagaaacgcggtattgatttctttattactaatattggtgacggtactgcacaaaaggcaattgaaattgcacgtagccttcgtaatcaaggttttgaagctgactttgatgtcaatcagaagaagttaaagaaccaattcaagaaggcagatcgtgaaggtgctaagtatgttattactttaggtgaaaaggaactggctaacggcgttttgaatattaaacgtttagctgatggcaagacaatcgatttaagtcttgaagatctaaataacatgactaaaataatggatgaattgaaggactagtaacaatggaaaagatcgaaaaaagaacagattattgtggcaatattactgaaaaatacatcggtcaagatgtaaatctctatggttgggtacaacgtgtacgtaacttaggtaacttggttttcatcgatttgcgtgaccgtgaaggcttggttcagatcgttgttaacaaagattctggtaagaagttaatggatattgccgattcacttggtaatgaatatgttgttcaagttaaggggaaagttgttaagcgttcagaagttaaccctgacatgaagactggtcaagttgaagttgatgcaactgaaatcattattttaaacaaggctaagaaccctccatttgaaattaaagatggaattgaagtctcagaacaaactagattaaagtatcgctatcttgatcttcgccgtccagaagttcaacaagcaattattttacgttcaaagattttgcgtgctactcatgaattctttgatgaaaatggttttattgatattgaaactccaatcttaggtaagtcatcacctgaaggtgcacgtgactacttagtaccatcaagaatctatccaggtagtttctacgctttgccacaatcaccacaactgttcaagcagcttttaatgggtgcaggatttgacaagtattaccagttagctcgttgtttccgtgatgaagacctacgtggtgaccgccaaccagaatttactcaaattgatatggaaatgtcatttgctgatgaagaaactattcagagttatactgaaggtcttttgaagaaaattatgaaagatgtcaagggcattgatcttaaaactccaattaagcgaattacttggactgattcaatgaacaagtatggctgtgacaaaccagatactcgttacggtatgttgattcatgacttaagcccaattttcaaggatagtgactttaaggtcttctccggtgcaattgctgatggcggttttgttaagggaattgctgttaaaaatggtgcaaaagaatactcacgtaagaagattgacaagaaggctgactttattaaacgattccacgctaaaggtttggcttgggttaaatttgaagatggcgaattttcaggccctgttgctcgcttcttgactgatgagaacaaagaagctttgaagaaggaatttgatcttgaaggtggcgaattagtagtattcgtagctgataagtggaaggtatgttgtgattcacttgaccaccttcgtcgtgaatttgccaaagaaactggtattattcctaagggtgtttatgactttgtttgggttgttgattggccattatttgaatacgatgaaggacttggccgttgggtagcagctcaccacccattcactatgccagatgatgaaggggttaagttgctaactactgaacctcataaggctcacgcacgtagttatgatattgttatgaatggtgatgagatgggcggtggctcaatccgtatccacaagcgctcaattcaagaaaatatgtttaaggcacttggtttcactaagaaacgtgcatatgaacaatttggttacttgatggatgctttggacatgggcttcccacctcacgcaggtttagctatcggtcttgatcgatttgcaatgatgcttgctgataaggataatattcgtgacgtttcagcattccctaagaatgcttctgcttcagaaccaatgatgcatgctccagctccagtagctgatcaacaattagctgacttggggatcgaagttgaggaaaagtaccaagacagtgtaaaggcaactgaagagcgtcttgaaaagatggctgctgaagatgctgcagaaaattcaacttgggataagtaataaatcaatataataaaaaataagtgatctcgctttgattgagatcacttatttttttatctgaattataaattattaacgaaatcactaatccgagctaaactttcttttaattgctcagttgatgatgcataagaaagacggacataaccttcaccgcccttgccaaagtagcgaccaggagtgacaccgacttttgctttttgagccagctcaaaagcgaattgctcatcattggtgccatatttttcggggatcttagcaaaaatgtagaatgctccttgcggtgtggccatttcaaagcccaacttttctaagccagattgcataaagtttaaacgtgcttcgtagatttcgcgtgcttttttaggatcgttttgaccattgtttaaggcttcgacagcagctatttgaacgttatcagtaactgaagtaactaaaaatgaattaatcttgcggatgctcttcataatttgtttaggagcagcaatatagcctaaacgccagccagtcatagcataagccttggataaaccggaaatcaaaatatttctgtcagggatgtattcagaaagtgagtgatgtttggctttgccataaacaagttctgcataaatttcatcagttacagaaaagattttgtattccttaatgacatctgctaaggtttttagagctgtggcagaataaacgcggccagttggattagaaggatcagttaaaataattgcctttgcacctttaccgcgaccattgagaacatgacgtaaatgttcagctgttaagatgaagtcatcttttttagtatcgacttgaatagggattgctccagtcattttaattagctgaaagtataaagcccaaaccggagtaggaaccaaaattttgtcaccggggttaagcaaggtcataaagacatcatttaatgcacctgttgcaccgacagtgacacagatttcactttttggatcataatgtacaccaattgagcggtcaaggtaattgctaatagcttcaagtagttctggcttaccagcttgaggagcataatgggaatcattagcctgaatatcacgaattgcggcatctttaatatgatcaggtgttgctaaatcaggttcaccaatagttaacttaataatcccagaaatttcagagaccttttggtcaaatgctcgaattttagatgcggtcaagttgtttagtctctcattaatagttgaagttaaatcactggataaatttggcatatataaagttcctttctgtattatataaattttaaattactcattaatataaaacaactatttttaaagcaacttgtaaattgaacaaaaaataggaaactgtcaaatcttttgtgtaaatagttctttctcgcaaattgattttttaattatttattcaaaataagattctaaggtatcctgaacctgaccaaagcctttatgaattcggttgaaatagcggtcattgtagctcattgcctggatgccaataaatgcatcaagcgactgttcagttggaaattctgccttaggcttagctttacgcttgatgacgttgttaaaggattcaatcatattggttgaataaattgaagctctgatttgtttgggataattgtagaagaccagcagatcgggctcaatttccttcaaacctttgatgacattgctataagctttattccatctggcatagaatttgtgcaagacagctgcagcttcttttttgcttgtctgttgatgtatctgcttgaattcgttcatgatcttttcgcggtcatccacccggactttagcacagatattgcgcatgacatgaaccaagcagcgttgaaaatgagctttaggataagtcctggccaaggctgttttcatgccaacaacaccatcagaaagaaaaagctcaacttgctttaagcctcgggatttcatgttttgaagcatatctgtccagacttcaatgttctcgctaggtgcaatgcagtagtcaatgacctccttgtgcccattaggcttgatgccaatggcaatatagactgcttcacgctcaaacgtttctcggcgcaaaggaaggtatgtcgcatccaaatagacacagaaaaacttgtcgcttagcttgcgcttgtgataagcctcaaccttggggagcatctgcttggaaatatttgatacttgagctggactataatgactgccatacattttctcaatcaagtcagcgatttctctggtagttacgcctttggagtagagcttgataatcgtgctttccaaaacatcagagtgctgcttgtagtcaggcagcgtgtgctgatgaaactgaccgttgcggtctcgaggcacttgcacttcaattggtccaaactgggtatcaaccttgcggaaataagcaccatttctagaattgccagtattccagccatttctggcatagggatcatagcctagaaaggcagtcaactcagcttctagcaagttattaacagcctgttgtagctctttgcgcaataaatcatttattttgtctggattgaatagagcttgagcaaaatctttggtaaaatcattcatgaaggagttcttctttctgtatgtgtttttttgttcaaaccaatcatacgagaaaggaactcctttttctaatgtttaaagaaataaatttaaggaatcattcatccttacacaaactattttacagtctcaaaaatagggaagatgaaactaatcatttccctatttgtttttaagaacagtattcaaattagtataaattgctggcttaggcagagatttatctggcatttgcagccaatgaggcaaaattccatttaaaggttgaagtggccttttagtgggctgatgcaactcaagcttcctatcaacaatcttgattgtagtggcacttttatcacgtggtacagaggataattgtggtttagtgcaggccgataagctaagtaagaatatagttagtaaaagtagtttttgcatatttttcaatttttcctccaaatataactcccaacctaagtgtataattttttacggtaagttgaataaataattaaaaaagcccaagtcctttgaatttggacttgagctcaaacaaaaagaccagtagtctgatgttaagaacaaaaaacacattagaagctggtcttttatgaattcaattgtaactgaaatcgcaaatattataaagtctgaagataattatattaagcgtgaaagaaaaataatctgtttcttcttaaacctgattaaggaaatcatggccttggctttagctaaagttgatgatgaaatgattaccaaggttaaagcacagggctatcagattgataagaagaatgagcgctcaatcaatatggcttttggcgaagttaggtatgtcagaagaagatatgtctgcccaggcaaacaagcaaggtatcccttggatgaattaatgggctttgacaaatacaagcgctacagtattttagcagtcaaaaacatcttagaagtaagcagcgttgccacttatcgcaatactgctctagcagtcaattgcctgtctggctttaatattagccatatgcaggtgggcaatttggtaaaaatggccgggaaaaatattaaagcgggccaagaagcagattcaagatatgatgccgcaggcactaagaaaaaggtcccagttttgtatcttgaaggcgatggcgtggtgatcaaaggcactaaaagccggttggaatttcatcgctatcaggtctgtgaaggcattgtcaatataagcaagaaacgcagaaagcgaatcaatgccaaggaatttgtttctttaagccgacttgatgcgctgaacgaagccaaggagtacctggccaatacttatgatctttctgatactgtaattcttagcaacgccgatggcggtgctggatatgccaaaacagacttcgatgacattgtagggctatgcaagcgtcatgagcatttcttggatgtctttcacctaaataagaaaatcaaagaaaggctatattttgcgcctgacctgcaaggcaagctgatttctgctttggaatacaaatacagctatgacaaagttaaaactatcctaaccactgcagaaagccgactaattgatgaattgaataccgagctcaatcatgattatctggggcgcctaaggaattatattgatcgtcattgggacgatattaagccgtttaagaaacgaaaactgactgtgactaaagccattggctgctgcgagagcaaccaccgcaagtatacctaccgtgttaaggggcaaggcaagaaatggtcaaaatctggagcagaaggcatgcttaggatcttaagctgcatcaagaatcgagagctggaattttggcttagcagcgagtttgaagattcagaaataactgtattgactgaacaggaattaaaagcagcggcccgtgacagcttaaagaagcgtcatgaagttcatttaggcatccagcatggcgcattaaccgcacaggtagctggcaatagttatttaagcaagctaagcagaaatttaagtcatataaatatttaagaaattaaggttagactaatggtttaaaggctaccgcaaaaacattgacacttacactcccaacacaatattctactatttaagtggacaatgataaaataaaaataagtttagatgacgaggaatggtaaaatgagtcgaataacaatttatatgacaggtggaatcgctgattataaggcagttaacgttatccgcgatttagaaaaagcgggtcatcaagttcaaatagtaatgactaaaaatgcagagcattttgtaactactaatacactggctgctttaacaaagtatcctgttttggatgatttatggagcaaggaaaatcagtctagcataccacatgttcatctagcgcgttggacagagttagctctggttttaccagcgactgcaaattttattgctaaaatggcaacgggaattgctgacgatgcagctagcactacaattttagctacaagtgcacctaaattggttgtaccagccatgaatgaccaaatgtggaataatccagctacacagcgaaatatagcttttctgaaagaacatggtgtagaaataatggagcctgcagtagggatgctggcagaaggctatgctgctaaaggacgaatgccagagccaggagcaattgtggcgtggatcaaaaatttcactgaacaacagaacgttttgcaaggaaaaaatattgttattactgctggtggtactgaagaagcaatcgatcccgtccgctttattggtaaccgctctagtgggaaaatgggcatttccttagctacagaagcagcagcgatgggagcaaaagtaaagctaatatatggtaatgtaagtatgcctttgccacaaaatcctaggattacattaattcatgtttctagtagcgaagaaatgttagttgcagtcaaaaaagaatttaagcatagtaacgttttaattatggctgctgcagtagcggattggcgcatgaaacaagttgcagatcataaattaaaaaagcaagctgatcaacaaactttgactctaactttagttaaaacgacagatattttacgcgaagttgctagccacaagcagcgagggcagatagttgtcggctttgcggcagaaacgaataatttgctacaaaatgctgcaaaaaagctatcttcaaaaggtgcagatatgattgtagcaaatgacgtttctaaaaatgtttttggcaatgatgaagaccaggtaacgattttacaaaaaaataagtcaactaagaaatggcctaaaatgagtaagcgaaagattgctcaaaaattgttgcagcttattgctcaaaaaatatagtatttgcatatagctaatagtgaactatatgatctatatttctcttgtaatcattttgtaatatagcatctaagctttttaaacatgtgatgaaaactataatgtgaaaactaaaagtaagtaaaagatgttttttatccttgtttaaatgataaatgctggtattataggtgttgggaattaagagactgaagagaaagagttgataggacatcatcagccctttctttttttatacgaaaatactaattttgtatagaataataaaataaattatttgataatctttataaacccagcagcattgattgatgctactattttaattagaaaatataacagaatcacaaaaaataaaatgtatgtataggatttgcaacaattttgttgtactctattaacagatggctgaaaaaaacaattattgtttaataattgttattagctatacaaatacaggaattaagaaacagagacatattagtaaaatgtagaggtgtatatatgtactctgataaaactttaatgctcaataacggagtagaggttcctcgaattcaactaggaacttggctaattaataacgatgatgtacgaaaagtaattcgtcaagcgattaatgttggttaccgcgctttcgacactgctaaagactatggcaatgaaagtggtgtgggaaaaggtatttggaactctgatgttgagagtagtgatattttttaacaactaaattaccaacttcgattaaagactatgaaggtacaaaaaagcaattgatgacgctttagatcgatttagtttggaatatattgatatgttgttaattcattcaccacaaccttggattgaagtgaatagaattaatgatcgtcactttgaaggcaatctggaaaactggagagcaatggaagaagcacttaaagccggtaaagttagatcaattggtgtttcaaattttttacaagaagacgtagctaacattgttaataacagctcaattaagccagtagttaatcaaatcgaagttcatataggaaatgtgccaactgatttgatgaaataatgtaaaaatttaggaattcagattaaagcatattctccacttgcacatggtcgtttgttaaaggatccaagaatcaggacttacgctgaaaagtatcatgttagtccagctcaattaatgttagcatttgacttacagctaggttgtattgttttgccgaagagtgataatgttaaagaaatgcaggaaaacttgaacatcgattttgaaatcagtgctgatgatatggctgatttggtcaagttaaaagaaaatacgcagaccatggctgtttaataggagcatcgcataagcggtgctttctttgttttaagggaaaaggtaatggaagaaattaagctaatcgcgatagatattgatggaaccttagttaattctaagaaggagattacaccagcagttaaaaaagcaattttgactgctcaaaaacaaggcaagcaaatcgtaatttgcacaggtcggcctttgtcaggtactcaacgttatttagatgaattagggcttaatggccaagaaaatcagtatgtagttagttttaatggtgcagttgtagaatcaaccgcggggcaggttattttcaaacaggggctaaaatatgaagattatgtagatttagagacaattgcgcgaaagctaaacttacattttcatagcgtatcgttagatcgaatttatacagctagccgtgatttgggacattatacaatttataattcacgggtcgtaaaattagaagtctcatatcgtacacaagaagaaatgaagcagataccaatcatcaaatgtatgtatgttgatgatccagactatttagatgataaaatagaatctcctttatttgaaatgatgaaagatcgagttgtattttcaaagactgagcctttttattatgaagcaaccgctgccggtgtcgataaggggactggcctgaaaagactatgtgactacttaaaaatagatcgaagtaatgtgatggccctaggcgatcaagcaaacgacatgccgatgttaacttatgctggattaggtatcgcaatgggaaatgctgttgaatatacaaagcaacatgctgacgaagttacggctgattgtgaccacgacggtgttgcagttgcaatcaataaaatattaaagtagatgttttctctttcaaatagtggtatttttactttaagatgaaaattgaatagaggtctaaaaataatgaataaagcaaaagttttagttttaggtggcttaagagatgaggccttaactgatttaaaaaatatttgtcaagttgatatcggtccagtaggacatcgaccagaagatgatcgtgagtgggtgcttgatcatattgcagaatatgatggtgtgatcgtagcaaagatggcttttgatcgagaaatgattgatgctgcgaaaaatttaaaaataatttcaacttatggcgttggctttgatcacgttgatgttgaatacgctaaagaaaaaggaatagttgtttcaaattgccctaagagtgtgttgcgtccaacggcggaacttgcctggacaatgattatggcatcagctcgtagattgcattattatgacgatgctttgcgtgaaggcgtctttttaaatgccgatgagtacgacaaccaagggtactccattgaaggaaagaccttaggaattgtaggtatgggtcgaattggtcaacaagttgctaggttcgctaaagcatttggtatgacaattatttatcataatcgtcatcaagtagatgatcaaattgcagcagaattagatgctaaatatgttgacttagatactttggcaaaagaagctgattttgtgagtttacatactcctgctacagctgaaacatatcatctggttaattcagactttttaaagaaaatgaaagacacagcgtttttaattaatgttgctcgtggatcgttgattgacggggatgcattaattgctgcgttaaagaatggttcaattgcaggcgccgccttagatgttttcgaaaacgaaccgcatccaagacctgaattggttgaaatggataatgtgatcatgacgcctcacgttggttcagctactcacattgctagatttaatttgtctaaagaagctgcgaataatgttttgtctttctttaaagatggtcaggcaattaatcaaattaactagttcaaacagagctaaaaaagacgattcatgcgaatcgtctttttctttacataatttttactgatgttaatcatgatcaagctgactatggtggtagccataaataaagtaaattacagcaccgatgattaaccaaatagctgccattaagtaaacttctgaacttaaatggcaaatcataaagatacaaattaaaccagaaatgattggcaaatatgggtatccgggaactttaaagccatcgttaacaatatctgttctttttcttaattttagaattccaaaggaaacaagagtaaaggcaaaaagtgtaccaaagttgaccaaattggctagttgatcaacggagaagaatgctgcacctgctgcaataataatagtgacagcgactaaggcattttgaggagagttatgttttttatctaatttactgaatgcactaggcaatagcccatcacgtgccatagcatagattaagcgagagcttgaatagatcattgtcagcatcatggtagccattcctagcatagcaccaaatgataataactctgctacccagttttgatgaacatattgcaatgcaaaagcaacgggattagatacgtttagcttggtataattaaccatacccgttaaaacgattgaaacgccaaaataaagtacagctgcaatagctaaagtgccaataattcctaggggcatatttttcttaggatttttaacctcggcggctgatgatgaaacaacatcaaagccaagaaaggcaaagaagactgtggttgctcctttgatgactcctgaaaaatgatatggcaagaacggatgatagttgttaggtttaatgaactgtaagcctacaaaaataaaaattaaaataatggcgattttaataaaaacagctacgacattaattttaattgagttcttcatccctcgtgacaacaggatactgataagtaaaatgattaaaacagaaaccaagtcaaaataaacgccattgttaagattcataggaccagaaatagcgtgtggaatttttagaccaaatggtgcaatgaaagaactgaagtatgatgaccaacctgctgccacagtggctacagatagcatgtattccaaaatcagtgcccaaccgataatccagcctgtaaattcgccataaacgatattcccatatgaataggcagaaccagctactgggatcgctgaagcaaattctgcataacacattccagctaaagcacaaacaattgctgcaacaacaaaggataaactaacgccaggtccagttaatgtggctgcaacagttccgggtaagatgaaaataccggtcccgatgacagctcctacgccaagagacattaaatcaacggcgttcattgttttggagaacttaatgtctttaccgagatagttctcaacattttgtttcctaaaaatattaaatttcattcgcaaacttcccttattatagattagattaattttacatgatatttttaatttttaaaagaagaaaacgctctatattttttatagagcgtttgaattaatcagctttaattttttgcttataccatttacaggaaaaatatattaaagcaattagaataagtcctccaataattaatgagtattcttcaaaaattaacacaatttgttcccaattttcacccatataggaaccaagaccaactagaatagcattccagagtaagctgcctaagctagtgtaaataaggaaattaggtaatttaactttggctattccagctggaattgaaattaagctacgaactacagggatgcagcgaccatagaagattgcaccggtaccgtatttatcaaaccatctgatagccttttgtacatcaccctttttaaagccaagtagtttgaataacttatgatcgaacaacttttctaatcgatctggattaagtaaagtgccaatccaatataaaactagtgcaccaactaccgcgccgattgttgaagcaataattacaccgaagacattcatttgagaatgatgggttgcaaagccagcgaacgatagaattacttcggatggaatagggggaaagatgttttcgattgcaattagcaaactgatggctaggtagccaaattggttaattaagtcaaaaactagattagtcatcaaaagttctcctcaaattttatttcttttaatatatcaacttttgtaccgaatagctatttctataagcaaagttaagatcttcttaaacagtctgtgttaaactattaaatgcaaattttttcagtgagatgagataatggcaacacaattaattgagaataaactaaaacttttaccagaaaaacccggctgttatttgatgaaagatattaacggtacggttatatatgttggtaaatctaaaaatttaaaaaatcgggttcgctcatattttaagagtaaacaggttggacgtcgtgctgaattagttcgtgaaattcgagattatgacatcattactgtatcaactgataaggaagcttttttacttgaaattacattaataaaaaagtatcaaccttattataatgttcaattaaagcagggtacgggatatccttacatagaaatcacgcgtgaacatgatccgcaaactcggttaactagtatcgttcataaggatggtggctactattttggtccctatcctaatgtatatgctgcccaggccactttgaagtttattcaaaaagtttttccactaaggcgctgtcatggttatcaaggcagaccttgtctttactatcatatggggcagtgcttaggtgcatgctttaaaaaagtgccacaaaaagaatacgaagagcaaattaaaaagatcaagagctttttgaatggagatattgctagtgttaagcagagtttgaccgaaaaaatggctcaagcagctagcaatcttgaatttgaacgagcagccgaaattcgcgaccaattgaaatatattgaagaaacggttgaaaaacaaaaaattatttccaatgataatacgcagcgtgatatttttaattattacgttgacaagtcttggatttctgttcaaatcttctttttacggcaagcaaagttattgcgtagagaaaccagaatgtttcctttgacagatgccacagatccagaagatgctttcacttcctttattgtgcaattttatgggcaaagaaatagggttttgcccaaagaaattctgattcctgaaggatttgataatgctactttagctgaggttttgaaggtacctgttagaacaccgcaacgagggcagaaaaagtcattgctagacatggcgaaggataatgctaagttaaagctagatgataagtttagattattagaactaggtaatcgaaaaactaaaggcgctcaaaaagaaatttttgatgctttaggcttaccatatggacactttattgaaagttttgatcactcccatattcaaggtgctgacccagtctctgctttagtcgtttttaaagatggtgaacccgaaaaaacagcttatcgtaaatataagctaaaaggtgaggttgaacatcaaaatggtggcgacgaagtacgcaacacgagggaagttgtccgccgaagatatggtagactgttgcgcgagcataaaagaatgcctgatttgattttgatggatggtggtcaaattcaggtcgatgcttgtttagatgttttacgaaatgaattaaatttgaatatcccagttgcggggatggttaaagatgataagcacagaacaaaccatttattatttggcgatcccatcaacggtattcctttgaaactgattccccttaatcccaaatcagagggcttttatttaatgacgcgcgttcaagacgaagtgcaccgctttgcgattacttttcatagaagacgccatgctaaaaatgctttgtccagtcgtttagattcgattaagggaattggtcctaaaagtcgtaacaaattattgcgcgaatttggttcattgaagaaaattaaagaagcttcaattgatgacttgcgtagagcaggattaacgcttactcaagcacaaacggtaaaattaacattgtaatccgagaaaacgcgatatcatgcgtatttctgtggtatagtattaaaagctagattaagacggaaggaagagatatacatgcctacatttgttgatcaaactaaaatcgaagtacaagccggaaaaggcggcgatggcatggtggctttccgccatgaaaaatacgtccctaatggcggtccagccggtggtgatggtggccgtggcggcagtattatttttgttgctgacagcggcttaagaactttgatggattttcgctatcggcgtaagtttaaggcggatagtggtgaaaatggtcgtattaaatcacaatatggccgtgcagctaaggatctttatttaaaagttccagttggtactactgtatatgattatgacactaatgaattgattggtgatttaactgaaaagggccaagaactagtcgttgctaaaggtggtcgcggcggtcgcggtaatatccattttgcaactagtgttaatactgcaccagaaattgctgaaaatggtgaaccaggtgaagatcgcgttttgcgcttagaattaaaattattggctgatgtcggcttagttggttttccgtcagttggtaaatcaacactgttatcagtaacaactaaggccaagcccaaaattgctgcttatcaattcacgactttaactcctaatttgggaatggttatcttgccagatggtcgtgacttttcaatggcggatttgccaggattaattgaaggagctagtcaaggcgtaggcttgggaattcaatttttacgtcacgttgaaagaaccaaagtaattctacatctagtttcaatggatcctaataatggtcgtgaggcaattgatgattaccataccattaaaaaagaactcaaaaattacgaaacagatttatcaaagaagcgagaattgattgtagcttcacaaatggatattcctggtgctgaggaaaaactagctgagtttaaaaaagcattaaaagcagaaggaaataatgaacctatttatgagatctcaagtgtaactcataaaggcgtagataagttgatgtcagatactgccaacttagtaactgaagttgaacaagaacaggctgaagaacaacctaagctagcacaaaagattaaagaatataagtatcaggcaccacaaaagaatgaatttacagttgagcaagttggcgaacatgaatttatcgttaagggtgaacaattagaaagattagttcaaatgaccaacttggatcaccaagacggtattatgcgtttagcaagaaagcttaagcgtttaggtgttgatgacgcactacgtgaaaaaggagctgttaatggtgatgatgtggctattggcaagtttgtctttgaattcgtacaataagagtagagatagggtatgaaaaaaaataggtttattacggggtattctggccttagagccttagcagttatcggagtaattctttatcatttggatcctaattcctttatgggaggatatctgggagtgccgatttttttcgtgctctcaggatatttggtgacagatcatatgtttaattcatatgataaaacaggatcatataataatcgtcatttttatttgagtcgaataaaaaagttatatccacaattaattactgttttatggttaagtgcagcctatatctttatctttcaacgaaatttactggctaaattaaatcaggttgtacttgcaaatctattaaatgtatttaatttttggcaaattcataatggtcaaagctattttgagcgttttgcagctaatgaatcaccatttactaatttatggacgatgtcaattgaaggccaattttatattgtttggccaattgtcatttatttactagttaaattggttaaaaagaaaaaaaatattttctggattttagttggtctatcagctgtttctgcattagaaatggcaatcctatactttttaaaggctgatattaatcgaatttattatggaactgatactcgtttcttttctttaggattaggagcagcattagcagttgtttggccgatagagagtttaaatcagcaagttgaacgaaaagtaggctggatactggacttggtgggccttgcttcatttgctttaatgttagcaatgtttttctctaagtggatgaatccacaacaagcctttacttactctggcgggatgttgttatttactttagatgtatgtattttagtagcggtaattgctcatcctggtagtcattggaatcaaatcctaactaataggttatttgattggattggatcgcgaagttatggcatctatctgtatcaatttccagtaatgatcttttttgaagataaggtaaatattggtgataatccaatgctgtatcaccttattgaagtgattttaattttagtgattacagaaattacttatcgtttgattgaaagaccaatgggtaggattacctgggataaaacgaaccaatattttgctcgaatttttaattttgaaacaaaagattactttaagaaaggtcaagcagccttagcagctttgattttaatcttaggatcagcagctattgctatttcaccaggagtaaaagcagaagactttaataaaagccaattagcacagcgaattaatcagaattctaaaaaacaaaaaacggataatgctaaattaattgaaaagttaaaaaaagaaaaaaagaaaaaagaaaaaaaatctaaaattattcgtgaagctgagcttcaaactaaaaagcatcctattaacaaatcctttgttaaatatggtatttcccagttagatttgcaattggctcaacatgttcaagtaactgcgattggcgactcggtaatggccggttcgagcaacgatttaaaacgattaatgcctaaagcgttaattgatgctgctgtttcaagacaattgaatgttgcttttggcttattagatagttatcaaagtcaaggagttttagcagataatatcttaatagggttaggaactaatggacctttctcaatggaagatcttgatcgaataatgcatcaggctggacctaagagaaaagttttctggattaatgttcacgttccaactagagattggcaaaattcagtgaataatttgctaaatcaaggtgcaaaacggtatcataatcttataataattgattggtattcatactcgaagaatcatcctgactggttctacggtgatcatactcaccctaatttaaagggctcaaaatactatagtgcattagttaccaaaacaattgttaagcattcaaaattttagattagaataggattttcatggaattacaatttttaggtactggtgctgggcaaccttcaaagcaacgcaatgtttctagtgttgcacttaagttgctggatgaattgaatgaaatctggctttttgacgtaggtgaagcaactcagcatcaaattttaagaacaaatattaaattacgaaaagttaccaaaatttttatatcacataatcacggtgatcacatttttgggttaccagggttattgtcaactcgttcttttcaaggtgatgttggtcctattactatttatggtcccagtggtattgaagaatttgttagaacagctcttaaggtatctcggactaaaatttcatattctataaggtttgttgaattagctaaatcagggttaatctgtgaggataagggctttcgagtgtatacggagcaactagaccaccggatacctagttttggttttagagtagtggaggcttcacatccaggcgaattattaattgacaagttagcacagtataatgttcctaatgggccacttttggggaaattaaaaaatggcgaaaaagtaactttagctgatggtactgttttggatggtaaaaatttcttaggacctactaaaccgggaagaattgtgacggtcatctatgacacacgttccacgccaagtattgctcgtttggctaaagatgcagatgttttagtccatgaatcaacttttgcaggggatgaacaaaaattggcgcatgattattatcattctacttcggttgaagcagccaaaattgctcggaaagataatgttaaattattatgtctaaatcatatttctgctcgttatatgggtgctaaagggaaaaaactcgaaaaacaggctaaaaaagtattttctaatacagtattagttaatgattttgatcagattaatattccaatgaaaggctcagaaaaatgaaagactcattaagaaataaagttgttgtaattacaggtgcttcaagtgggattggacgttccattgcccttgaaagtgctggtcgtggtgctactgtaattttaattgctagaagaaaggaccaattagatgaaattgcagcagaagctaaagaactatccggtgctgaagcatatgtttttccaacagatatgggtaagccggaagaaattgaacaaacctttaatgcaattactaaacaagtaaaacacattgactttttagttaattgtgctggttttggtaaattcgaagaatttatggaccaaaaaatgcaagacgttaccaatatgttccaagttaatgttttaggtttgatgtactttactcgtttagtaggtagggtcatgatggaacaaaagactggtcaaattattaattttggctcaattgctggcaaggtaccaactaccaagtcagccgcttacagttcatctaaggctgccgtaattcaattttcaaatgtcttacggctagaattaaagccatttggtgtcaaggtaatgactgtaaacccaggaccagtttatactaatttccttaatgtagcagataagactggaaattatgtcaaaaatgttcaagaatttatgttggatccagatgatgttgcttggcaagtagttcacttctttggcagtgataaacgtgaattaaatttaccacttagtttagctgtagcggctaaattgtataatctatttccatcgattggtgataagatttccttaaagtttgcttctagaaagtaaaaaaagatggaaaaacaaagaaatttaattattggatcagttgtggctttaattgcagtaatttttgttgttttaaatacatcacctgtcgcaattaattttggcttttttaaggtgaggttaccactaattgttgtgttagtggtaatggtgattatcgggatgattattgcttggttctttggacgagatactaaggaaaaaacggatcacaaggtcactttcttcaataaaaaagagaagaaaatagaataaatcttgatttattagcaattgaatagtatgattgaactacgtgagtgattcggggttatatgaccctgaagcttaagactacaataaaggagatcaaattaaatggcagttcctgcaagacatacttctaaacaaaagaaacgttcacgtcgtggtcacattaagttgagtgttccagcaatgcactatgatgcaactactggtgaataccgcttaagccaccgtgtttcaccaaagggttattacaagggtcgtcaagttgtaaataacaacgacaacagcaataactagttaaaggacacctttgatatggtgtctttttttatgcctagaaaaaggaaaaagaaataatgaagttagtatttttacattctagtgatacacatggatttttgttgccaactgattaccaaaataaaaccgactatcatgctccttttagtttgagtagagttagctcagttattaaatctgaaaagaaaaagtatggtgataacaatgttgtagttaccgatgcaggtgattgtttgcaaggctcaccacttgcttcctatgctcattcaactggcgattatagtgatttacgtatttttacgcaagcttataatgcagtggggtatgatgctcgctgtttaggtaaccatgattttaactttggattagattatttaagctactatgttgataacaatgaggcaccaatcattaatgataatgtactggatgcagaaacagaagttccattttttggtagagaatacactattatcaagagaaatggcttaaagattggtttattggggattacaacgcaatatatcccacattgggaacctaaagaaaatgtaaaaggcttaaagtttgcctctgcttacgaaaaaattaagcattatgccaaaatattacgccctcaggttgatattttagttgtgatgtatcatggtggctttgaaagtgatcctgaaactggtaaggcgactgaacctaatcgtggtgaaaatgaaggttatcagattttaaccaaaattccagaagttgatgtcctattgacaggtcaccagcatcggcgcttaaatttggttacacgcgatactgctattgttcaaccaggttatcgcggtgaagctgtagctgaagtggttcttgatattgatgatgatactaagaaaatcaaatcaatgtccactaagttgattgacactaaagattatgatcctgatcctgtaattgttgatattgtatctgacttggataaaagaacacaaaaatggctagatcaaccaattgcacatttagataaacctgctcgaattgaaaatgcaatgaaaggcagaatagaaggcgcgccatttattaatttaatccagcaaatgcaattatggtttactaaagctgatgtttcggcaactgcagtgatgagtgagacagctaagggatttgataagaccattactatgagagatgttttgttaaattatccgtatgctaatcagttgtgtcgtgtgaagctgactggtaaagaattacgtcatattattgagcactctgctggctttttgaagaaagatgaagcaggaaacattggctttattgatcgatggattaagcctaagccaatgttgtatcattttgacgtcttttatccagtcgaatatgaagcggatttatccagaccagtaggtgaacggctgactaaactaactttgcacggtaagccaatcaaagatgatcagatttatcatttagcagttaacaactatcgtgctatgggtgggggattttatcctgaatatagtatggacaaaattgaaaccactttggataaggactatgtacaaatgtttagcgaatatttgactcatggaccagtcgaagtagatacaaaaaagaattataagttttactaaaccaaacgaaaaagacgtgagaataaaaacatctcacgtcttttttgaatagattgaataattattttaacttactgtatttactattatctttgtgtgaacgagcagtaatagtcgcaataattgctgagaaaagaataccaaaaatgatcccaacgattacacaatttcttaaatctgtgccgttgaatgaagcacttcgggttaaaggaccagcaataaagcctacaactaacatgtagattacgctccatacagttgtgatgatataacgacccataatgattccttctttcgtgtatgattttatcaaaaatgaagcgcaaattcaaacctgattggttcaatttggtatacttaatttaatgtttgtaatgacgaaaggtggttaatttatgcaagtagcagcacttcaaaacataagctcctttacgcttttaagtagtccaaccaaggtaagtgatttgataaaagacgctaaagagaagggctatcctgtggttggtttagccgacgtgaacgtgacttatggtttggtcaatttttatgagttggctaaaaaggcgggaattaaaccacttcttgggatgcaactgcgtttaaatggtttggttgatagcacccaaaaatatgatttgctagtttttgccaaaacaaataagggctatcataatttattgcgactttctagcgcggtaaatttgttaacggaaaatgggcaaaacgataaggtcttaacgctgaatgaattaaccaaatatttagatgatttgttgattatcgtaccagctaatctaaaaagtgaattaatggcgctgcatgatacaaatcaggcattaggcagtgattatgttcgccaactaaagaagttaacgtttgatctttatttgggtgtatatgcttcaaaagcaagtatagattacattgattatgtccgtggattagctaagcaatttgaattatctttagttgcagtggaagatagtcaatatttacggccacgtgagcaatttttacaaaaaactttgcgtgcgattgctaagggagataaattgcaagatatattgccactagctaagcaagctggttcgcattatttagattctgcacaaaatgttttagaacgctatcatcaatatgacttggatgatgcaattaataatacttggaaaattgctcagaaatgtaatgctgaagtgatctttcaaaaaccggtcttacctaaatatcatcaagataagtttccgacttcagaagaatatttgcgttatttggctcaaactggtttacaagcgcgctttggtcaaaaaagtattccagccgagtatcagaaaagattaaattatgaattacgagtcatcaatcagatggggttcgatgattattttttgattgtatgggatgtaattaactattgtcaccgagtaaaaattactactggtccaggacgtggttcagcttgtggttcactggtttcatactctttgcgtatcactgaagttgatcccatccaatataatttactgtttgagcgttttttaaatccggctcgtcatgagatgcctgatattgatctggacattcctgatattcaacggaatacagtaattaagtatatgtatcaaaagtatggcatggatcatgctgctcaaattttgacttttggtacaatggctgctaaacaagtattaagagacgttggccgggtttttggcttaacaggaccagaaatcactaagtggactcacgcaatcccgtactctaaagataaaatgggattaaaaaaagcatatcaagagtctagagaactaagattattggttgatgcaacgcctgagaataaattgttatttaagactgctttaggacttgagggattgccaaggcattattctattcatgcggctggattggtgattagtgatgattcgattgctggcatttcgggattgcaggctggtcctttcggcattcctgtaactcagcaaaccaaaaaatatgttgaatcattaggtttgctaaagatcgactttttgggattgcgcaatttgacagttttaggcaatattttagctttagtgcggcagcaaggtgtaaagctagatcctaatacaattccgttaaatgatcccaaaacaatggaactgtttcaacaaggtaaaacagatgcagtcttccaatttgaatctggtgggattcgtggtgttttgcgtaaattgcatcccgacaattttgaggacctagtagcggtgaacgctttataccgtccaggtccaatgcaaaatattgacgcatttgttgcaagaaaaaatggtacggctactgtgcattatcctgatcccagtttaaagcaaattttacaatcaacttatggaattttggtttatcaggaacaagtcatgcaaacagctcaaatcctggcaggattttcattgggtgaagccgatattttacgacgtgcgatgtctaaaaagaatcagaatgtcattgagcaagaacgtggaaaatttattgctggtacggtcaaaaaaggtcatcctaaagaagtaggtgagcgagtttatcattatatagagcaatttgctaactatggttttaaccgttcacacgcggtggcatataccaagattgccttttggctagcttatttgaaggttcattatcctgctgcattttacacagcgatgctcaattcatcaacgtctgctaaagcgcaaagctattcgatgcaagctcaggaagctggagttcgtattttgccgcctgatatcaatcacagccaattagactatactttacaagatggcaagattttagttggtttaaaagcaattaaaggattacgtcttgattttgctaaggaaatagctgccaatactaaaccgtataagtcttttaatgattttttgcgtagaatcgatgctaagttcttacaagtagacgcaattgaagcattgattatggctggagcatttgactcaatcgaagataatcgcaatgagttattgcttaactgcaaagatgtaattgctaatgtgcaattaacgggacaaaatatgtctttatctgagattctgggggatgcaccacttaagcctgctgagccaccgactgctgcccaaaaagcagaaatggaagagaaagctttaggctttactacaacaactactcctctaatagctgtacaaaaatatgcacaaaaatttaacgctagaccattgaatcaatttcagttaaatgatagtggtattagcgtgggtaaattaatgaagttaaagcaaattaggaccaaaaatggaaaaacaatggcttttgctagttttgctgatacatctagcgaacaagaaattattatttttccaccggcttatgaaaaatttggctctattttaaaagaaggagatatttatttactaggagtcaaggttcaaggtgatcgatttgaccaaaataaaaaacagtatttcttaaccaatttgcgaaaagttaattttaaagaataaagttcaaattacaaagctatctttgacgatggatgtaagtgctaacaagaaactgtcaaatcttttgtgtaaatagatctttctcgtaaattgattttttaattatttatttaatcaaagtaggattctaaggtgtcctgaacctgaccaaagcctttatgaattcgattgaaataacggtcattgtagctcattgcctgaatgccaataaaagcatcaagcgactgttcagttggaaactctgccttaggcttagctttgcgcttgatcacattgttaaatgattcaatcatgttagtcgaataaattgaagctctgatctgcttgggatagttataaaagaccagcagatctggttctatgtctttcaagcttctgataacatggctgtaaaccttgccccatttggtatagaagtcatgcaggacagctgtggcttcttctttgtttgtctgttgatgcacctgtttgaattcgttcatgatcttttcacgatcgtcgacgcgtactttagcgcagatattgcgcatgacatgaaccaaacagcgttgaaaatgagctttaggataagtcctggccaaggctgttttcatgccaacaacaccatcagaaagaaaaagctcaacttgctttaagcctcgggatttcatgttttgaagcatatctgtccagacttcaatgttctcgctaggtgcaatgcagtagtcaatgacctccttgtgcccattaggcttgatgccaatggcaatatagactgcttcacgctcaaatgtttctcggcgcaaaggaaggtatgtcgcatccaaatagacgcagaaaaacttgtcgcttagcttgcgtttgtggtaagcctcaacctttggaatcatctgcttggaaatatttgatacctgagctggactgtaatggctgccatacatcttttcaattagatcggctatttccctggtggtcacgcccttggagtaaagcttgataatcatgctttccaagatatccgagtgctgcttgtagccaggcagcgtgtgctgatgaaactgaccgttgcgatcccgaggcacttgcacttcaattgggccaaattgcgtatcaactttgcggaaataagcaccatttctagagttgccagtattccagccatttctggcatagggatcatagcccagaaaggcagtcaattcagcttctagcaatttattaacagcctgttgtagctctttgcgcaataaatcatttattttgtctggattgaatagagcttgagcaaaatctttggtaaaatcattcatgaaggagttcttctttctgtatgtgtttttttgttcaaaccaatcatacgagaaaggaactcctttttctaatgtttaaagaaataaatttaaggaactcctttttctaatgtttaaagaaataaatttaaggaatcattcatccttacacaaactattttacagtctcgctaacaaacttaaatacggaaagaaagcataaattagcccaatttttgtgagcttttttgcctaaaaaatgttaatatttatgtgatgtgagaaattacacaaaataatcatgatgaggtgaattcatgaaacggattggtattttaactagtggcggagacgcccctggtatgaatgcagcaattagagctgtgacgaagactgctatccatcatgggcttgaagtctttggaattcgttatggtttcgctggtttggttgcaggtgactttgttccgcttaccacggaaaatgttgaccacaagattagtgaaggcggtactttcttgtacagtgctcgtttccctgaatttgcacaagaagaagtgcaacaaaagggtgttgagcaattaaagaaacacggtattgatgcggttatcgtaattggcggtgacggttcataccatggtgctttagccttgactcgccacggcgtaaactcagttggtttaccaggaactatcgataatgatattccttatactgactacacgatcggctttgattctgcttgtcgtactgctatggatgctatcgataaaattcgtgatactgcaagcagtcaccaccgcgtattcgttgttaatgtaatgggtcgtgaatgtggtgatatcgctatgcgtgtcggtgtagcaagtggagcagacgcaattgtaattcctgaacgttcatacgatgttaaggaaattgcagaaactcttactcgtggttttgcagatggcaaagatcatggtatcattgttttagcagaaggcgttatggctgctgataagtttaaggacgaactccttaaatatggtgactttgatgctcgtgctaatgtccttgcgcatatgcaacgtggtggctcacctactgttacagatagagttaatgctactaagatgggtaattatgctgttaagttacttctcgatgggaagggcggtttagctgtcggcatggagaatggtgaacttaatacccacgacattcttgatttgtttgacggtaaacaccaaggtgattatgcgttattggatgtaaatgaagaaatgactaaatattaatttagttgatttttggagaggatttttttaataatgaagaaaactaagattgttagtactttagggccagcttcaaacgatattgaaactattactgctttagctaaggctggtgcaaacgtattccgtttcaacttctcacacggtgaccacccagaacaccttgctcgtatgaagatggttcgtcaagtggaaaaggatactggtttacttcttggtatcgaccttgacactaagggtgctgaaatcagaaccactgaacaagaaggtggcaagttcactattaatactggtgacatgatccgtgtatcaatggatgccactaagaagggtaacaaggacatgatccacgttacctacgacggtttatacgatgatacccacgttggtggtcacgtattaatcgatgatggtttggttgaccttttgatcaaggaaaaggacgactcaaagagagaacttgtttgtgaagctcaaaacactggtgtaatcggttcaaagaagggtgttaacgctcctggtgttgaaattcgccttccaggtattactgaaaaggatactgatgacattaagtttggtttgaactatggtattaacttcattactgcttcatttgcacgtaaggctcaagatatcttagacatccgtaagctttgtgaagaagcaggtgcagactacgttaagatcttcccaaagattgaatctcaagaaggtatcgacaacgcagacgaaattttgcaagtttcagatggtttaatggttgctcgtggtgacatgggtgttgaaattccatttatggaagttccatttgtacaaaagagcctaatccgcaaggctaacgcacttggtaagccagttattactgctactcaaatgcttgactcaatgcaagaaaacccacgtccaactcgtgccgaagtttcagacgttgctaacgctgttcttgatggtactgacgcaactatgctttcaggtgaatcagcaaatggtctttacccagttaaggctgttaaggctatggctgaaattgacgaacgtactgaaaagcaaatgcttaagcgtaatactttagctcttcaaagattcgaagcttacaagggttcaaacgtaactgaagctatcggtgaatcagttgtacgtactgctcaagaattaggtgttaagactatcattactgcaactaactcaggttacactgcacgtatgatttctaagtaccgtccaaatgctgacattattgctatgacctttgacgaaaaggttcaacactcattgggtatcgtttggggtgtacaaccagtattgactgaaaagcctaagtcaactgatgacatgtttgaaatggctgctaaggtagctaaggaaaagggttacgtaaaggatggcgaccttgtaattatcgttgcaggtactccacttggtgactcaggtacaactaacttaatgaagttacaaatcatcggtaacaagttagttcaaggcttaggtgttggtaacggttcagttatcggcaaggctgttgtagctaactcagctgaagaagcaaatagcaaggttaaggaaggcgacatcttagttgctaagactactgacccagactacaacccagctatcaagaaagcttcaggcttagttgtagaagcttcaggtttaacttcacatgccgcagttatcggtttatcattaggtatcccagttgttgttggtgctactgacgctactgacaagatttctgatggttcaactattactgttgacgctcgtcgtggtgctatctaccaaggcaaaatctcaaacctttaattttaagaatataatttagatagattagctaatcaaaaaatagccagcttaagtgctggctattttattttgcataaaaatctcttatacttatatgtaagaatatgtaaagtaggagatttttaaatgcttggaacagttcgtaaaggaaaaattactgacgaaaacgataaagcttattatgttcaaattgatggactgacttatgaattgaagaagatcgagattacgcaagatgatattcctaaaattggagatgaagtcgaaggttttatttatgataataaaagtcatgatcgagaaatgacacaatttttgccattcgcgcaacccgatcaatatggttggggaaaagtaaccgaggtacgtccaggcttaggcgtctttgttgatgtaggtctacctgataaagacgttgttttatcaatggatgatcttcctagagaaaaagaaagatggcctcgacgtgatgatcgacttttagtaagattagaaactgacgaaaaagatcgtatttgggctaagctagcagatgaaaatatttttgaccaattagctgctaactttccacgtggaatgaataatgaaaatgtctttgcaacggtttatgttacacgagagataggagcatttgttttaactagtgattattatcttggctttgtacatgaatcgcagatgccacgtcctatgaaactaggtgagcaattcaagggtagagtagtcggtgtcagtcaatatggacgtttgaatttgagtgctttgcctcgtgcttttgaagaaattgatgatgatgcgcaaatgattttgatgagtttgcggagaagagaaaccaagactctacctttctatgacaaatcaagtgcacaagaaattaaatcatactttggtatttcaaaatcagcttttaaacgtgcggtcggtcatttgctcaaggctggattaattgaagaagataaaacagcaggtacgattactttaattaaggatccagaagagaacgataatggagaagattaatttaaaagatcaaattgatgattatttacgctatagtcaagttgaacgaggattaagtgataatacaattaatgcttatcgtcaagatttagaagaatttcaaacttttgtagaaaatgaaggtatggcttcatggccaactgaagcaagcgatgtggatgcgtttttagctcggcagcgtgatttgaacaaagcaaccagctcaattagtcgacttatttctagcatgcgtaaattttatcaatggttagctcggcaaaatattcaaaagttaaatccaatgttggaaatcgatttgcctaaaaaagaacgtcgtttgccgacagctctctctcaagctgaaatgaataggctacttgagcagccaaatactaaacgaaagttaggtatacgtgatcgtgctatcttagagacattatatgccacgggaatgagagtaagcgaattaattaatttggagttgcaggatttacatgacgatttaggcttagttcgggttcttggtaaaggcgaaaaagaacgattgattccaattagtcctgttgctcttgattggataaaaaaatatgaaaatgaagttcgtgatccgctaattttacaagtagggaaaagcgatgaacatatttttttaaataatcgaggaaaaaagattacacgacaggctatttggcagatgatcaaaaagtattgtcaaatggcggcaattactaaagatgtcacgccacacactttacgtcatacgtttgcaacacatttgctagaaaacggcgcagatttgcgagtagtgcaagaaatattaggacattctgatattagcacgacacagatctataccaatttatcacaaaagcaaattttaaatgtttatcagaagacacatcctcgtctttaggtgattaaatgctaatacaatataaaaaagattatgagaagatagcaatgggattactatcctatttacctgattttaaaaatatcgaaaacttaaaagaagaaatcacgcttaatcaggatgaaaatgactttattttgtatctttatcgtaatagtcaaaataatatggtgggcgtaataggaacccaagtatctaatcagtttgtaattattagatatttgtctttagctcctggttttcgtgagattagttatgaacggaaaattgttgatgaactaaagcacgaatatccagataaacgaataactgctgtaccagaatatacaaatttattaaaaacggtagaagaagataatggacaaaagtaacttaactttagaattaccgaattttgaaggaccacttgatttattactgcatttgatccaatcgcaaaaaattgatatttatgatatcccaattgcccaaataactagtcaatatttagaatacttgcgccaaatgcaaagcttaaatttacaaattgcaggcgagtattttgtcatgtcatcaactttattgcgaattaaatcacagtatttgttgcctcaaaacgattttgtagatgatattcaacctgatgaagatccaagagacgaattagtgcaacaattggtacaatattctgtgtttaagaaaatatctgcttattttaaagaacgtaatgaagaagtaccgattacagttgctaaagaagctagtgtatcaaccactgctaaagttcaaccgctgcctaagggtcagataactgcacaagaattagcgacgacttttacgatggtcttacatcgtttgaagttgcagcaaccagataccgcttcaattagagtagcagaaacgccgatcaatgagatgatggattttttgcatggacaattgaaacgaaaaaggcaagttagtttctttgcttgcgcggacaaaatgcagaatatctcagatgttattggcttatttttagcgacactagaattgtgtaaaaaacaattaattcagattacacaagcacgtgaattcggtgatttaaatttagaaagaattgatacgaatggcaagtaaactagcaaatttagaagctcttttgtatgtcgcaggtgacaatgggcttgaggagcaaaatctaattgaactacttgaagttgatggtgaagagctaggtcagttagtcactcgtttgcagcaaaaaatgaaggctgatccagactcgggaatgcaaataattcatattgcaaatacttataagatgacaactagtcaacagacagctaagataattgaaaagtattttcaaaaagatttaactaagaatttgagtcaatcagcacttgaaattctctcaattattgcttatcgacaaccaattactagaatagaaattgatgatattcgtggagtaaattcatcaggagctttacagacattgatttggcgaggattaattaaacaagacggcaaaaaagatgctccaggtcatcctaagttgtatgttacaactgattattttttacaatattttaattatcaaagtttggctgatttaccgttaatcgaagactttgaggatacaactgatggtgaggagattgacttattcgattcaaaaggtagcgcagacaaacatttagaaaaagagggatagaaaatggcagaacgattacaaaaagtaattgcggaagcaggaatcgcttcaagaagaaaagctgaaaaaatgattgtagccggtcgagttaaagtagatgggcatgttgttactaagctaggtactaaagtcgatacttttagtaatattacagtcgatgatgagccaattgagcgggaaagcctacacacgtatttgttttataagcctcgtggcgttgtttcgactgcagaagacgatcgtggtagaaaaactgtagttgattatttcgaagatttaccatatcgtttgtatccagtaggaagattagattatgatacgtcaggtttattgctaatgactaacgatggcaaattagcaaatttattgatgcaccctaaaaatgaagtggctaaggtctatgtagccaagattaaagggattttaactcctgatgaaattaaaaccttgactcaaggagtaaagttggatcattttaaggctgcgcctgccaaggtcaaagtattgaaaactgatcataagaaagacacacaaattgtccaaattacaattcatgagggacattatcatcaagttaagcgaatgtttaaagcagtaggtcacttagttgataagcttgctcgtgaaaaatatgcctttttaactctggattcgcttacatcagggcaatatcgggaattatcgaagcatgaagttgacaaattaatgcaattgaactaaattataactgtaattaaatattcaaggttattgtcttcagggcagggtgaaagtcccgaccggcggtgaaagtccgcgacccacgtcagtggttgaatcgttagataccgatagttaaagtctagatggaagaagacaggctaaaaaaacttactacactttttaaggtctgttgctgaagcaatagaccttttgttttgggaaaggaaagtaagttatggatcaagctaaatccaagaatagtagtttaactaatgtgattgcatatgctttaattggctgtattgcttttgtagttatgaaatttgaatttccaatcatgcctggagttgccttcttaaagtttgatttttcagatgtcattattacaattggaatgtttatttttggcattgtaccgggagttattattgctttaattcgaatgttacttagtttaatttttagtggttttgcattaccaagccttgttggaaatctagcagcattcttagcttcaatgtcatttgcagttccattttatttattaagtaaaaatgtgagtgcggataaccgcaagacaatgatgggcagagttaaaccaatttgtggtttggtaattgggattatcgcaatggcagcagtgatgtcattggctaatgccttcgttttgactcctatttacgcagtaacagcggtaccaaacttgcctgctattaatagctatagtgccttgttaagctttactgagaaagtttacttgggtcagttattgcatttaccatcaatgtcaacctacatttttagtattatcatgccctttaacttgttaaaaggattaattaacgctgtggctgtttacttattgtttgaagctaccttgaaaacaattaagccattcgttcgtaagagatttaatttgaattaagttatcatcccatcaattttttaagttgatgggatttttcatattcaaagcatcctaaaatatgctaaaattaatccgttaagtgaatggaggaatttttgatggataaaaagtcaaccgggccatatcagcactatgaacgacctactgaaaagcgaagctcacaagatagtcagcctagtggatcagcacgttggatagcagttattataattttagcggttattttaattgcacttatcccagttgttcatcgtttggcttcaagccattcagaaaaagctgaagaagttcaaacagttaagaaggtttcttctaaatcatccaagtctgttaagactaagaaaacctcatcatcttcttttagcaagaaaaagtctgaaaaggctagttcaagctcatctagtagttctgctactcctaagacttatttagtccaaagtggagatactttaaatgaaattgcagaaaagaatggcttgactgttgatgaattagccagattaaataatcttaaagactcttcaaatattgaagcaggtcagacacttaagttgaaataatctttcagaaaggataaaaggggtcgatgataagatctcttttttattagaatgcaagtagcagtagatggtcctgcatcagcaggtaaaagtacagttgctaaaatcattgcaagtaaattatcctttgtctatatagacacaggggcaatgtatcgtgcatgtacagtgattgctcgtaatcataacttagattatggtgatgaagcgggtatcttgaatgccattgatgaagatggaattgaattgaaatctgaaaatggtgagcaaaaagtatatgtagctggaaaggacgtttctaaagaaattagaacgcctgaaatttcagctaatgtttcggaagtatccgctttgccgaaagtacgagaaaaaatggtaagtctgcaacgtgaaatggcaggcaagacaaatgtcattatggatggtcgcgatattggtacgactgttttacctaactctgaagttaagatctttttagttgcttcagcaagatcacgtgctgaacgtcgtttattagattttaaagagcgtggtattaaatctgatcaaacagttgatgaaattgaaaaagatattgcagcaagagattataaagattctcaccgcaaaatttcaccgctaaaaaaggcagatgatgcaattgaaattgacaccacaaacatgtcgattgacgaagttgtagaggcaattttagctcaaatcgaaaaaaaacaaaaaaattagaaaaaatagcacaaaatagtagaaaaatatctcggtttcctataaaatgggacatgatattgggaggtacatatgtcagaaaacagtaatcaatttttagacgcattaaagcaaatgcaaggagttgaggtcggagatattgtcgatgtcgaagtattagacattgaagacggccaaatcgatgttggtgttgaaaacgctggtgttgaaggtgtcattactcgtcgtgaatacacttcagaccgtaacgcagacttacgtgatttagttaagcctggtgacaagtttaaggccttagtattaagaagagccggtggcgacaaggaaaatggtgaattcttcttctcagttacccgcttaaaggaaagagaagcctacgacaagttacaaaaagacttcgaagacggaaatgctgtcgaaggtactgtaacttcatcagttcgtggtggtttaattgttgatgttggtacacgtggtttcttaccagcttcattaatttcaaaccgttacgtttcagatcttaagccttacattggtaagactatgaaacttaagattaccgaaattgatcctaacaagaaccgcttaatcctttcacacaaggatttagttgaagaagaacgtgaagaagcatttgacaaggttgcatcacaattagttgttggtgacgttgttgaaggtaaggtttcacgtttgactaacttcggtgcattcatcgatgttggtggtgttgacggtttagttcatatttcagaaatttcttacaagcacgttgataagccaagcgatgttttaaaggttggtcaagatgttaaggttaaggtcattggtatcgacaatgacagacatcgtatttccctgtctattaagcaaactgaaccttctccatttgaacaagctacagctgacttaaacgaaggcgatatttttgaaggtgaagtaaagtcattaactaactttggtgctttcgttgaagttgctgatggtattcaaggtttggtacacgtttcagaaatctcaaacaagcatgttgacaagccaagcgatgttttaaaggttggtcaaagtgttaaggttaaggttttgaacattgacccaagtgatagaagaatctcactttcaatcaaggctgctgactcaaatgcttcttcagaaaatcataattctcgtccacgtcgttcacgtaacgaaaattcagtaaacaagaagtacatgagtgataacgacaacggctttgcattaggtgacatcattggtgaccaattaaaggaccgtaagtagtcattttataaaaaagccgacttgagtcggcttttttatttatgtttagattagtaaaggagggcgagaaatggttttaccagttgttgcaattgttggtcaacccaatgttggtaaatcaacacttttcaatagaataattaatcaacgtttagctattgttgaggacaaacccggtgttacccgagatcgtaattatgctcaagccgaatggatggggcataagtttgatttgatcgatactggtggtattacctgggaaggtggcaagatcgaggaagaaatcagagctcaggcagaaattgcaattgaagaagcagatgttatcgtgatgttaaccaatgtggtaaatcacgtgacagatttagacgaaagaatagctcatcttctttaccgtactaaaaagccagttattttagctgtaaataaagctgataatcctgaacagcgaagcgatatttatgatttctatagtttaggattgggggatccgattcctgtttcaagtagtcatggtactggtattggtgatttgcttgatcagattgttaatgattttcctgacgataaagatactgaagctgatgatgttatttcttttagcgtgattggtcgaccaaatgtaggtaagtcttcaattgttaacaaattacttggtgaagatcgggtaattgttgctaatgaagaaggaacaactcgtgatgctgtcgatacgccgtttactcatgatggtgtaaaatttaaggtcgttgatactgccggaatcagaagacgaggcaaagtgtatgagaagacagaaaagtactctgtaatgcgcgctatgagtgctattgagcgttcagacgtggttttacttgtcctcgatgcaagtacaggcattagagaacaagacaagcatgtggctggatatgctcacgaggcgggtcgtggaatcatcattgtcgttaacaaatgggatttgccgaaaaagaatagtacaagcgctaaagaatttgaacgtgaaattagagatgaatttcaatatttggactatgctcctattctttttgtttctgccaagacaggtcaaagattagatcaaattcctaatatggttaaagaagtctatgataatcaaaatcaaagaattcaatctagtgtcttaaatgatttgttgcttgaagcaagtaagttagttccaactccaatggtgaagggtaagagattgcgtgtttattacatgacccaagtaagtacgaatccaccgacttttgttgtatttgtgaatgatccagaattgatgcacttctcatatgaacgatttttgattaatcaattacgacaaaactttgattttacgggtacaccaatcaagattttaccacgtaaacgtaaataaaagataagcaaaatatcataaaaaaccttgttgttataaggtttttgtgatatttttgtttttagggaacatgattagttgtgatcatttttccttgtttagcttaaacaaagaaaaattttttgaacattaggttcaaattcaggaggtgaattattcatggcaaataaggctgaattagtttcagaagttgcttcaaaaactaagttaactaagaagcaagttgcaaatactgttgatgctatccttgattcaattcaagaaaaccttgctaagggtgaaaaggtacaattaatcggttttggtacttttgaagtacgtcaccgtgctgctcgtaagggccgtaacccacaaactggtgatgaaatcgaaatcccagctagtgaagtacctgcatttaagccaggtaaagctcttaaggatgccgttaagtaatagcttaactaatgtgataggacgttggactttgttccggcgtctttttttagtacaatggtaacttgattggaggtattatgagttattctgaacaattactagatgcaattcaaaatcatgatttttcacaaaacaaacaccttttaaaagaagctttagataatgatgctcccgaggtcttgtcatctttagcagaaaacctaactggcttaggttttacagatttagcaaaagaaatatatcgagctttaatagctaaatttcctaaagaagatttatttaaagtttacttggcagagattatgttaaatgatggcgatgatgacgatggtctgtcgcttttatataatgtccctgagagctcttcagcttatttggatagtctattagtacaagctgattattaccaaactaacggcttaatagaaacagctaaggacaaattaatacgagcactacaattagctccagaagaagatgctattaaatttggtttagcagagattgaatatttaagtggtaattatgaacaagcacttgagttatatcaagatttaatcaaacgtcaaagtacttttagtgaagtaaatctgtaccaaagattatttgcgacttttgccaaattaggtaattatgaagaagctgccaaagttattcgtgaacatgcaaatagtattttagatattgattctaagtatgaagcaggattagttctcttatctgtaggtgatgataagcaggcaattaagttcttagatgaagtgattgagcaaagtcctgactatgtaaatgcgtatccattattagcacaagcttatgatcatcagcatgacaatgaacaagtattgaggactgctcaagcaggattagcgtacaatgaactggatgaaacactttattcaatgggagcacgtgcagcagctaatttgaatgaattggatacagctcgtgacttacttgaaaaggggttaaaagtagcgccagacaatagtgatttacgtatgcagctatctaacctatatgttcatgaacaccaggctaaggagaatattgccttatttagtaacttagatgaggaaagcgtggagccacaggcacattggaatatggcattatcatatgaggatttggatgatattcagaaagcacagagcgaatttttactagcttatccggatttcaaggataatccagactttttgcgccaaatgataatctttttcaatgtacaaaataatgatgaaataacaaaacaactgctagaaagatatcttaagttagctccagaagatgatgaaatgcaggatctttataataatctgtaaaaaaataccacgaagtttttgcttcgtggttttattatttctaaaaaataggtgccaacagacgtgaaaagtattgtttaaacttaagccatttagattgctgattaaagtattcattagttagaagactgcaactagctaggtccttttcaaaaatttgtttaagttcttgagttaattgaatattgtaattaaaagcgttaacctcgaagtttaaggtataacttctgaagtcttgattggctgaaccaacagatgagatattggagccagaaaccattgttttggcatggatgaagccatcattatatttgtaaattttaacgccatgagcaactaaatattttgcataatattcggtagctcggtaaacaaagggatgatctggcatgcaagggatcatgatgcgtacatcaacaccgctattagcagcaataattaatgcttctaaaatggattcttcaggaattaaatagggtgtttgaatatagatatagtttttagccccagcaatgatgccctcatatcctcggcgaatgccataatgttggttatcgggacctgaagaaacgatttgcattgctacgttatcatcgttgtcaagatctttacgttcgacagtaaaagcatgtaattcgcttagatcaaatttaggtaatgcagttcgtctgatagaagtattccaatccatggcaaagcgtgtctccattaggataggtgattgacccacaacacgtaaatgtgtatcgcgccaatgaccaaattttttagattgattaacgtactgatcaccgatgttaaagccaccaatatagccaatatgatggtcgattacgattaatttgcggtgtaaatgataatttagtcgtggtgtagtaaaccaatgctttttagaagtagaaatgaaaggctgtgcttcgccaccaagctctcttaaatgattaaaaaaagcaggtttagtaccacgtgagccagagacatcataaataactctgacttttactcctttagcagaagcctcttctaaggcccgtaagacacgctttcctagattatcattataaaaagtgtagaactctaaactaatcgatgttttagcttgcttaagatcagcaattatttggtcaaacaactcgggtccactggtgaaaaccttaactttattggcaaaagttaaaatagcatcatcgttgtttaaattcagctctgataacatgcgggcacgtggtttgcgctttttttcgggtaaaagatcatgttctgccaacatagctttttgtttttttagataacgattacgcgtctctttttgagcactttgaatagcaaaaatttcgtcactaagtgtataattttttacggtaagttgaataaataattaaaaaagcccaagtcctttgaatttggacttgagctcaaacaaaaagaccagtagtctgatgttaagaacaaaaaacacattagaagctggtcttttatgaattcaattgtaactgaaatcgcaaatattataaagtctgaagataattatattaagcgtgaaagaaaaataatctgtttcttcttaaacctgattaaggaaatcatggccttggctttagctaaagttgatgatgaaatgattaccaaggttaaagcacagggctatcagattgataagaagaatgagcgctcaatcaatatggcttttggcgaagttaggtatgtcagaagaagatatgtctgcccaggcaaacaagcaaggtatcccttggatgaattaatgggctttgacaaatacaagcgctacagtattttagcagtcaaaaacatcttagaagtaagcagcgttgccacttatcgcaatactgctctagcagtcaattgcctgtctggctttaatattagccatatgcaggtgggcaatttggtaaaaatggccgggaaaaatattaaagcgggccaagaagcagattcaagatatgatgccgcaggcgagactgtaaaatagtttgtgtaaggatgaatgattccttaaatttatttctttaaacattagaaaaaggagttcctttctcgtatgattggtttgaacaaaaaaacacatacagaaagaagaactccttcatgaatgattttaccaaagattttgctcaagctctattcaatccagacaaaataaatgatttattgcgcaaagagctacaacaggctgttaataaattgctagaagctgaattgactgcctttctgggctatgatccctatgccagaaatggctggaatactggcaactctagaaatggtgcttatttccgcaaagttgatacgcaatttggcccaattgaagtgcaagtgcctcgggatcgcaacggtcagtttcatcagcacacgctgcctggctacaagcagcactcggatatcttggaaagcatgattatcaagctttactccaagggcgtgaccaccagggaaatagccgatctaattgaaaagatgtatggcagccattacagtccagctcaggtatcaaatatttccaagcagatgattccaaaggttgaggcttaccacaaacgcaagctaagcgacaagtttttctgcgtctatttggatgcgacataccttcctttgcgccgagaaacatttgagcgtgaagcagtctatattgccattggcatcaagcctaatgggcacaaggaggtcattgactactgcattgcacctagcgagaacattgaagtctggacagatatgcttcaaaacatgaaatcccgaggcttaaagcaagttgagctttttctttctgatggtgttgttggcatgaaaacagccttggccaggacttatcctaaagctcattttcaacgctgtttggttcatgtcatgcgcaatatctgcgctaaagtacgcgtcgacgatcgtgaaaagatcatgaacgaattcaaacaggtgcatcaacagacaaacaaagaagaagccacagctgtcctgcatgacttctataccaaatggggcaaggtttacagccatgttatcagaagcttgaaagacatagaaccagatctgctggtcttttataactatcccaagcagatcagagcttcaatttattcgactaacatgattgaatcatttaacaatgtgatcaagcgcaaagctaagcctaaggcagagtttccaactgaacagtcgcttgatgcttttattggtattcaggcaatgagctacaatgaccgttatttcaatcgaattcataaaggctttggtcaggttcaggacaccttagaatcctactttgattaaataaataattaaaaaatcaatttacgagaaagatctatttacacaaaagatttgacagtttccgaaatgtgtcatactgcttttgttttacataaatttctaactaaaaataaagaaatcgaattagttcttccagagacttggcaagcaaaagacttatttgatcaacttcaaaaaaatcttactgagttttctaaatggttagtttgggccaacaaaattgattctgttcaaaaagaagccgattcaattaaaatgtttcaacaaaaaatggttgatggtacagcattcaacctagttattttagttgatggacagccagctggcatgattgacttacataatttgaatcatgaatctggcgaagtaggatattggctttctaatgattttcaacatttaggaattatgactgaatctgtcgaatttcttaagaaatacgcatttgaacagttgaagcttgattatttgattttaagaactcatcctaagaattccgctagtcagaatgtagctaagcgaagtagtttcgtgtatttaaaagatgatgaaaatgggcataaggtatttgtgctaagaaataattaaaatataacgacttcaaagttttaataaagggagaaatttatgcaaagaagcgatattgaaactgaattaggcaagattaattttgcctatcgaaagggagatccattagttgtttttttgaatggctttggtagttttgatacagcacaatctttttcaaaagtaattgaagctttgcccaataagtatggctattttgcatcagattatttgaatagtggctttagtggcaagtctttaaaggactatacagtatcagacgaagctactaaattagctaaaattattaacgattttaatgcaaaaaaagttataattttggctcatagcattggcggtgtgtatgctatgcaaatgaaagataaaatcaataatttgaaggcttttgtaggaattgagccaactactagagaaatcatgttaaatcctccaaaggaaccagcttatattgagaaaaataaaaacatggcaaaacttcaagaaaaaattgaagctgatcttagagaaatttttactccagaagaaaataaaaagttttggacaactacagagcaaaatgcgaagaaatttgatgaaaaggataatttaaacgcacaagcagcctacgaaaatgattcgttttggaaaaatactaccaggataagtgataaaacaccaagtattgttattacagaaaagtatcgtgaaaatgaatataagcggtcagaatacacttcaaataatcctaaatctaaagttataacattaggcgaatctcactatatacattttgaatatccaaaacaaattgcagaaatagttaaagaggttatagatcttaaaaaagaaactgtcaaatcttttgtgtaaatagttctttctcgtaaattgattttttaattatttatttaatcaaagtaggattctaaggtgtcctgaacctgaccaaagcctttatgatttcgattgaaataacggtcattgtagctcattgcctgaatgccaataaaagcatcaagcgactgttcagttggaaactctgccttaggcttagctttgcgcttgatcacattgttaaatgattcaatcatgttagtcgaataaattgaagctctgatctgcttgggatagttataaaagaccagcagatctggttctatgtctttcaagcttctgataacatggctgtaaaccttgccccatttggtatagaagtcatgcaggacagctgtggcttcttctttgtttgtctgttgatgcacctgtttgaattcgttcatgatcttttcacgatcgtcgacgcgtactttagcgcagatattgcgcatgacatgaaccaaacagcgttgaaaatgagctttaggataagtcctggccaaggctgttttcatgccaacaacaccatcagaaagaaaaagctcaacttgctttaagcctcgggatttcatgttttgaagcatctctgtccagacttcaatgttctcgctaggcgcaatgcagtagtcaatgacctccttgtgcccattaggcttgatgccaatggcaatatagactgcttcacgctcaaatgtttctcggcgcaaaggaaggtatgtcgcatccaaatagacgcagaaaaacttgtcgcttagcttgcgtttgtggtaagcctcaacctttggaatcatctgcttggaaatatttgatacctgagctggactgtaatggctgccatacatcttttcaattagatcggctatttccctggtggtcacgcccttggagtaaagcttgataatcatgctttccaagatatccgagtgctgcttgtagccaggcagcgtgtgctgatgaaattgaccgttgcgatcccgaggcacttgcacttcaattgggccaaattgcgtatcaactttgcggaaataagcaccatttctagagttgccagtattccagccatttctggcatagggatcatagcccagaaaggcagtcaattcagcttctagcaatttattaacagcctgttgtagctctttgcgcaataaatcatttattttgtctggattgaatagagcttgagcaaaatctttggtaaaatcattcatgaaggagttcttctttctgtatgtgtttttttgttcaaaccaatcatacgagaaaggaactcctttttctaatgtttaaagaaataaatttaaggaatcattcatccttacacaaactattttacagtctcttaaaaaataataggagttgatgatcatgaggctaaaaagtgtaagttttaaaattgcaattttatttttagtttttacagcagtttttacacttttccgatcatcaatgtcaggaattttttcattattttatgctaaaaatggaatcccggatgcaaatattggttcaataaaatcttttcaaaatatcggtattgtatttggtcttcttccagcaggatatttagctgatagaattggaagattgaaagttttagctttatcatctttagttattgccacgagttttttcattctaattctatttagaaacttctttttcttttcagcggcagagcttttatatggtattggcttagctcttaattcaggtactttacttgcctatgtaactgacttacaggaacaaaataaaattgcccctagtagcaaactaatggggatgcaaataattattttgaatttaaccacattaatcggtggaaatattgggacttggctatttggaattaaagatactgcactgatatggttcgcaatgcttggacttgtgttatatccagcctttatttggcttatgacaagtttcttatcttttcagataatagggcttctagtaaaaagaaagataaatataatattaaaaatattgttggcttttttagaaaaagaaatttctggattttgttgttgctgaatgtgggttatgattgtggaacgcagtttatccttatctactggtcgattatttatgttgaaaaattaggctttaatctttcactagtttatacattatttatgtgtgcattaattctaggttcgattttatttagtaaaatttctacttcctttaattcaaaagggattactttgttgaatactggaagtatgattggagcatttatattaagtggtactctaaaaaataaatatttactgctttgcctttttctattaattgaactattgatgggaatgatgtcgggacaaatttcagctactagtaatgaagccatttatggagaaagcaataagtcgactatgctttcaactgtttcatttattgcagagatcttggttagtatttcattatttataagcaatagtattatgaaagtatttggagacttaaaagtaatgtttttttgtatccgcagtgtattttggtgttgttttgctaacaataccattaataaaggagaaagataccagataaatcatggtaaccgatcataaaaacattgaagtattgcgatagaaacgaaattactgttttgggcaaattaacatctgatttgaggttatagtcatgattacaattgaagcgctgcataattttccgaaaatagagagaaagtgcaacttaagtgcagaaataattaggacaatcaaaaatgaaggatttaatatacgcgataatgatgttttatgtattgcttctaaattgatttctaaatctgaaggtctgtttgttcacttaaattctattaatccaagtcaattagccttacgtttgcatcagcaaatacctagaaaagctccaagactaattcagattataattgatcaaaccgaagataagagtggtaagaaactaaagatatctaagaactttattggtgggtggttgccgaatggtttgtttttaactagtgcaggtgtagataaaattgatgctggtactgcaatagttttacctaaaaattgtgatgaaattgctaagagaattagtgatgatatttttgatcaattaaaagtcagagtagctatcataattaccgatagtgatggaagaattgataaaaaaggtgcaactcaagtagcaattggattgtatggtgtttctggtttaagaaaaagtcagtatcaagataaaactaatgttgaaactatctgtgacatgctagccgcttctgcaggattattgatgggacaaaaagggaaaatgctgcctattgttaaaattcatggtatagattataatagattatacatttgataagtttgcaacaattagagatgcagtgaattaattttaagaaagtgaagatttctatgatgacatcaaaattaattataattcgaggaaactctggcagtggcaaaactacactgtctaaagaaatccatcgtcgattgccacacaatacactattgattccacaagatacagttagaagagaaatgctgaatgttaaagacggagaaaagacatttgctttgccattattagaaaacttgcttgagtatggttatcatcactgttcttacactattttagaaggtatcttgaatgcgaaatggtatgctgatttattcaaaaaatctcagcagctttttggtgatcaaatttatgcctattattttgatattccgtttgaagaaacaatgaaacgccataaaactcgtcatgaacattcttttggtgaagaaacaatgcgctcatggtggaatgaaaaagattatcttggttttattcccgagtatgcttttactagtcagattaatttagacgatgaagttgaaattgtgatgaatgatattcaagtagaggactagcgatggttaaaaactatattaagaccttacgccaaaaagttggtcatgaaccaattattctaaattttgctggtggaattttggctaatagcaagaatgaaatcttacttcaaaaaagatcagattttaatgcatggggcttacctggtggtgctttagaatttggagaatcagctccaaaagcatgcgttcgagaatttttagaagaaactggcttaaaagtaagaactaagtcactattaggcgtttcaactaattttatccagcattatcctaatcaagatgtggcacaggcagtaactgttgaattagtagaaaaaatgtcaaaagagattagctctgaaactcttgatctgaagtatttttctaaagataaattatccaagatttttaacaagcaacatcaaatttttattgatcattactttaatgaagactatccatttattgattaagggagaatatatatgaatacgcgtggtgctagttaaatcgttttagttaataaaaaagtccaatcttgttagactcgacttgtaaatagtaataatagaaaagagtctgatctgattgaactgccttaagcttaagcgttttagccaccatttacaagttagttttaaagatttagtgataatttgtcggcactggtatcgtttgtatgcaccggctgagtttactcatcggcgaaatattgatcaaattaaaactacggacagtctgattttggctttacttatctggcaagctaagacaggaattgaatcacaaagaagattctgtgaatgtttcaattgtttatcacactcacgttttaatcggcgttcacgtcagctattgcaattgatttatcagatacggcaagaaatgaataaaaaggttgacctgaatggacagttcttgatcattgacagctttccggtacctgtttgccaaccaattcgcaactatcgtgctaaaatttttcgcggttatgccaacattggttataaggccaccaagaaaatttacttctatggtttcaaagttcatgccattgttagcgatgacggttacattcttgattatgtcgtaacaaaggcatcagttcatgatgccagggagacagttgaactgatagaaaatacccatccatctaattactatcttcttggcgacgaaggctatttaggcaaagaactgcatcaacagctaaaacaaatgggttacgaactttggacaccatatcgtaaaaatatgacaggagctaaaaagcacaatgatcatcaattgatggctattcgcagaacaattgaaagcgacttttcgcttctgacctattacaatgccgagaacaatcgagcacgtagtctgataggctttcaaagccggttggaaattgcaattttagcttataatttggcttattgtctagaacgatttaactagcaccacgcgtatatgaatgaaggatcatttgttttagatattgatttaagtaaaaaagctgtaatagaacctggagtcgaaaatttagagtataagtttcatgaaaaattgctttttgcatttgtcccagatgatgaaattaactcgtttttagataaacactctcataagactctgggcaaatttaaaactgtttcgtttagacctaaaatatatgaagtggaagtcaataatcaactaattacgttatgtcaagctccagtgggagcaccagcttcaacaaagtttttagactggttgatcaattatggagttaaacaagttttatctgttggaaacgcaggagctttggataatctacctgaaaacacgatgtttgtccctcaagaagcgattcgcggagaggggacatctttttactacaaagaaccaagtaagattattgcattagataaaaattttgtaagaagagttgagaatgaaataaaaaatttaggtttccaatatgaagagggaacaacttggacaacagatggattttttagagaaacacctaatcaagttttgcaagctaaaaaactaggtgcaaaaactgtagaaatggagtgctcagctttagctgcttgtgcagaatttagaaatataagttttgcacaaattttgtttactgccgatagtttagctgatatggataactatgataaacgtaactggggccatgattcatatagcgttagcttgaatattggatctcaggtattagcgagtttatgataatatttcaactaaaaatggagtgtaaaatatgaacaaacaaccattcattttagactttgacaaacatcctcatgcggttcttgaaccaaatcacgatcaagaaccatttcattttcatccaagattgctttacgcattcgtgccggaaaaagaaattaatgcatttttagatcaccattttcaccgtactttaggtgaatttgagtcatgttcttttaatcctaaaatttatgaagttcaaattaataacgaatttttcactttgtgtcaagcgcccttgggagcaccggcagctgtacagttgcttgaatggctaattgcttatggagtagaaaaggtgttaaccattggaacagcaggtgccttagtagatttacctgaaaatgcgatgctacttccaacacgtgcaattcgagatgaagggacatcttttcactatatgaatcctggacaacttgtggaactagattctatatttttgaaggaagtagaaaagattttagttgagctaaatatagaatatgacgagataacgacttggacaacagatggtttctttagagaaacgcctaaaaaagtggcacaatttcgtcagttaggcgcgtcaactgtagaaatggaatgtgcagctttagcagcatgtgctcagtttagaaagattgattttgcacaatttcttttcactgcagatactttagctgatatggataattatgatgaacgtgattggggcggtaaatcgcatagtgtaggtttaaatataggtgcaaaggttttaacaaagattaaataaagaaaaaggaagaagttgaaagtgacttcttccttttattattaaattgaatgattattgtctttttttataaaccattttctagcaaaatcaattagcggttttacatttattgctttgatgacaccattgtttaacttaacctttttgatagcagagggatgctttgcttcaaactctgtccctaattcattaaagtcatcatatgaatccatatcaatattttgatattcagtccaaatagttttgccgctttcatccagactagttgcagcagaacatgtttcggtttttctaccaattgtggattctgcatagtgcaaaactgtacacgtttcataatcagtgcctaaaaagatagttttgccattattctggtacaaataatctaaaggactgtcaattccataaggaatatttaaaggttgattctgtgcaatctttactttgtttttgccccaaatagcaattggcaagtaaggatgggtacttcgaacaacatctggcaaagttctgaaatactctggcgtaacccctaagccttctgtcattgatgttgtaggattataaggtggcatagcatccttaactacttgaatcaaagatttttgtactggtggatattcccaagtggctggatcacaattcgtagaaacttgtgagggcatcattattgttccattaggcacagcttcttttaaggcttcgacaatggtttctggaccattaggaacgtaatagaatttacttagtgcagtatgaactaatacggtatcatcatctttaatacccgcatttcttaatgcactcttaaaatcattttttgttgtgactgtgttaattatctcttcagacatatggttttccttttatgttaacttgaatttttttactggcttggtctgaagtgagatactctagttttaatttcggtattatttattttagctttctgattactcatttgttgttgctcttttctaatactaatctatctaacagtttagcactaaatattattaagaggagatgggctttcataatgtataagttgaaaaatagatttaaaagcagactaaaaagtcttaattgatcaaaaaataagggcgatattggatagtcatcgagactgtaaaatagtttgtgtaaggatgaatgattccttaaatttatttctttaaacattagaaaaaggagttcctttctcgtatgattggtttgaacaaaaaaacacatacagaaagaagaactccttcatgaatgattttaccaaagattttgctcaagctctattcaatccagacaaaataaatgatttattgcgcaaagagctacaacaggctgttaataacttgttagaagctgaattgactgcctttctgggctatgatccctatgccagaaatggctggaatactggcaactctagaaatggtgcttatttccgcaaagttgatacgcaatttggcccaattgaagtgcaagtgcctcgggatcgcaacggtcaatttcatcagcacacgctgcctggctacaagcagcactcggatatcttggaaagcatgattatcaagctttactccaagggcgtgaccaccagggaaatagccgatctaattgaaaagatgtatggcagccattacagtccagctcaggtatcaaatatttccaagcagatgattccaaaggttgaggcttaccacaaacgcaagctaagcgacaagtttttctgcgtctatttggatgcgacataccttcctttgcgccgagaaacatttgagcgtgaagcagtctatattgccattggcatcaagcctaatgggcacaaggaggtcattgactactgcattgcacctagcgagaacattgaagtctggacagatatgcttcaaaacatgaaatcccgaggcttaaagcaagttgagctttttctttctgatggtgttgttggcatgaaaacagccttggccaggacttatcctaaagctcattttcaacgctgtttggttcatgtcatgcgcaatatctgcgctaaagtacgcgtcgacgatcgtgaaaagatcatgaacgaattcaaacaggtgcatcaacagacaaacaaagaagaagccacagctgtcctgcatgacttctataccaaatggggcaaggtttacagccatgttatcagaagcttgaaagacatagaaccagatctgctggtcttttataactatcccaagcagatcagagcttcaatttattcgactaacatgattgaatcatttaacaatgtgatcaagcgcaaagctaagcctaaggcagagtttccaactgaacagtcgcttgatgcttttattggcattcaggcaatgagctacaatgaccgttatttcaatcgaattcataaaggctttggtcaggttcaggacaccttagaatcctactttgattaaataaataattaaaaaatcaatttacgagaaagaactatttacacaaaagatttgacagtttctagtcatcgtccttataacttgaaaattatttattacgcatttttgacaaatacttttgatgcttttcttcatctttttcaatgaagaagtaagctactgcggctaatacccctacgactattccgaccaaaatagttttccaagtgaaattggttaccatgtagcatgaaataattaatgccaaagctggaataacatagccgaatgggagcttaaaaccgttatttggaaattcattagtatgcttgaatttgattactgctaagatagatggtacatattgaataaatgaagccaatacaatgcaagataccaagaagaggtatgattgtgtgattaaaatcatagtgatgattgcactgagtaaaatagctacccaagcagcatcatgcttgttcttttttccaatccatttaggtaacattgcgtgctcattagcaagagaagcaatcaacgatggagtcaagagaagcaatcaacgatggagtattgaaagatcctgcaaaagcaacgccgataacactaatcagcatccctgcaatcactagaacgtagccccaatcaccaacggccttttgaaaggctacagcaataggcgtactgtaattaaccatcttggatcctaaaatcccgatagctactaacatcattaatgcatataaaatagtcacagtgatcatcactgagatcaatactttgggaatatttttctctggattattcatctgttttggggcaatcggaataaaggagaatccagtaaacatgtaaaatactacactaaatgcagcaccaaaatgtttgaagtaaggaccaacacctagggttgctgctttaggaatcacaggtgtaaagttcattttatgaataaaaaaggcaccaatgatgataaaaatcagaatagtaatcattttggcagcagaggataagttatcgactaattttacaattgtccgaccaaataagttaataatcgtaaacagcacaattagcacaattattccaatagctatcccgtagtgaacagcgtgattactaaaaacaggggacaaagtctttaaaatagttaacaaagctactatttctgccgcatatgtacagcatcctaaaaaccaagtatatattccaagttcgtagccagtaaatcgcccaaaggcgtgatatgaataaagccaagctgcgcctgatccagtaaaacgacttgacaagtcagcataacaaagagtaaccatacttactgtaagagcagcacaaattgttatgaaaacactcatcaagttcatatctttatagattgtttgaggtattaaaaaggcaccggacccaattaccccattaattcccaagaagtaaatagacatgaacgaaagcttcttgggagtaactgttttttggcattgttttcatcctcttgattgcttgatattgacaaacgcttacaagctaagattagttcttgccatgaaagattgcaaagaataagtgttatccatcccataaataaaaatagagaaaagtgtataacttctgcattttttgttaaaatataggtaagaagattaagtaatgattaggggatgagatcatgatgaacaaaaaaattatgtatatggcaggagtagtcttagcctccttaagtttaggtgcgatgactgctcagacagttaacgcagctacaactaatccaattcgtcagggtaaaaagttaaacttgactagaaaagcaacgatttttaaccgtaaaggagaaaaagttggacatttaaaaaagggccgtgtttacaagatcctaggcattaaatcaattaatggcaataattttgtgaagattggtaagaataaattcgttaaggaaggggcatttttaccatacattaaggacacagccgagacaattaaccgcattaagcatccatcatatgtttatgataaaaatggtcagccaattccaggtaagtttgttaaacaaggctctaaagttaaaaatcttggccataaagaaattgatgaacggccattcattcaaattggagaaaacgaatacgttaaagctaataacgtattgactgtaattattaattattagtaaaagaaaagctatatcatgaaatgcatcatggtatagctttttacttgtggatgaaaaagcgatgtggttttttataagtgaaatctgtggtcattaattgaagtagtatcatatctaaccttttccttggtatatgtaccttttagggttgttcttgctcttcagcattctttaatattctttttgaatctttgaattttcctgcttttttcctgcttcaaattcatttgttttttactacttttagtttagatttatttttatcttcttgtagaatagtttgagaatcaggaaaattctttagacgctcgatagcagtattttttactttgttggtaatgtgcaagtaaattttctgagtgattgttgagttgctatgacctacacggtgctggatcacatttaaaggccaaccttgttcggctagttttgatacgtgtgtatgtctaaagatgtgtgttaccaaatttttatgtatttcttctttttttgcgatagtttttagcatgcggtctatagaactaatgctaaaataattattatgataccacttgcttgtaaaaatataatcgtttgccttttttcctttacagtgatcaagggctatttttttagcctctggtggtagataaacatcacgatcaccagaaaatgttttagcatttttggttttgcgatatctttcacttagctttttttctcctttaataaaaattaatgttccttcaactctagcaaagtagttgccatctttgtcttgtagtatattctttttttgaagagcaattgcctcgccacatctcatgcctgtattatataaccagataaaaaggtcctttagatcttggcgattgtgcttatcacaataagctaaaatcttcgcatattcatcatcttcaagatatttgttttctatttcttcatgtctttttttggattggcttttccaagttatttttacctgatttacaggatttttagaaatatatccgtatctaattccaagatcaaaaacaccagaaatacatgacttataactattaactgttccatttgagtaatgacaaggattatcgtaaagtaggctatcaagatacttgtttataaattgtgatgttatatttttagcaataattttagtgccccattcgcgattaattttttgtaatgttgtttttttacgataccaggtagtatgggctaactgttgtttggcaactgatatatacttatcagtaagttgctcaaaagtaatatccgtgttaccagtctgtaagtcaattaatcgtttgcgaattttttcgtcaagaagtaattgcgcctttttctttacttgattattatttttaccgaaagtaacacttacttcttggtatctttgagttaaagggtttttgtaattatcaacaaatttaaatttacctgtttttgtttttacaatccacatgtttttacctctattttctgctaaaatagagtatgcgaaagccgctgtgctttcacacactgctgttcaattttttgttcagttagagttcaatttttttctaattcagcatgattgccagatctttgctgaatcgaccctcactcgttgccagacgggtgggggatttttttagtttttagttttgttcaacccagttcctgatatcatttctgtcagcattcaatttattacgcattgcgttgtattcccgagaaccgacttgattttcaagtgaactgttaaatttacgacgtgcattttgtaaacgtctgtctcgctcagcttttgtcatgaaccagccattgccttttacgacacagatagagcctttgtttacagcaccatagcctaaatgggtaataatccatgcgttattatttgcttgagtagcagttacaacttgacctgaactaagagattgtttaaaaattctttttagtcgaggactgtattcaaacatcttaaccctcttagtaatcacaacctcagttggttgagcaccagctaaagctttgtaaggaactttaaactttttgtgagtagttcttttcttagcacgtttgtgctttttggctactttaactgatttagtgtgggatgcaaaaactgttgaggtaggagctgataaaatttctcctagagttgcaccaattgctaataatgacaaaatcttcttattcaaaactctatatcctcctaaatagatcaggtttaatgtcactgtggacaattaaggtataatatcaatgaggtgaatattatggatgaagaacgaattcttgataaattaagtaaaattgaaggcttacttattggtatttctattgaaataccaattgttttgtttatgatgttttattattttgaaatgtgaaatacataaactaaaatcaaggttacaattactcctgtaataatagaggcaagtgcactagtaaacgtttgaattgcaaactttgaaggataaaacactaatattatatctattttgaatattcattatttattccttaattgagtcctagtaactgcttcttcttggcttcaaattcatcttgtgtaatgattccatcatcagctaatttcttatattttctaagctggtctggtatgtcattattagttttggtactgatgctctcgtttgattgcttttgcattccagcttgaatgattgaaattaaagaattcatttctgaagtagcacctttaacaataaaaccgtttgctttttctttacctctgagaaaagttacttcgaaattcgagccatctgaaagattaatgatcaagcctaagtggtctatgtattcatagttctttccgccagtcatagctccaacaattgctccagctcctccagcaattgcacctccaaccaaagctcttgttataccatgttttttgttttcattatgtcctttttcatttacttgataagaaattatatctttaaattcaagaacacgataatcagttaatagagttttggcacataaaatctttttgctctttaaatcaaagtaataatgtgaaaattttttagcatcgctttgtttgaaagtatcaagaactcttttatattcttcttttttcttttgttgatcttcatattcttgcctagctttttcttgtctaatctgttttttgtgttccttctcttttttctttttaagcttttcgtcttcctttttctcttttttcagttctttttcagtttcaagctcttgtacaatatcttgaaatgtcttgttatttgaaagcatattttcgaagtcttcataattatgatcagttgcccatgatatagctgcccaagttgctgtatcgcttttatcatttttagaaaacttatatttactaatacacttgccacaaatatactttttgtctttaaattttaaatcttgatctaaaaagccaatcttacttccacagttagaacaaagttttgccattttctttttctttctaatcacttacaaactataactaaccttaattactttacccaagatgcgacctggattttccttattgaggaggatcgggtcgtattttttattctccggcatcaacattacttgtttgccaacatgcttgactcttttgagtgttgcttcctcatcgtcatctaccaagactgcagctatttcatcatcttcaacggttggctgaagacgaacggttactgtcgcaccgttgggtatcttgggttccattgagtcaccttggcatttgagagcaaaaagcgtgccatctggcttttcttcaaacagttcagttgtgtagccgtcaatattttgctcagccagaataggggtgccacatgcaatggttcctatgattgggatgcgaattgcatgcatcccggtttgatcaataggtttcatgttggtaggttgcttgtgtactttaagtatatctggcgattcaacatgaaataattcagccattttttcaatataccccattctaggtattctagatccacgttcccagttataaaccgcttgttcagaaacatctaatttatcagccaactgagcctgagtcaaagaatttttggttcggtaaaactttatattctcagatatagcgctcattttctcacctctttgttaatagtataacagttttgttagggtaaataacaaaaagttaggtaatttgttagatttttattgaccataacaaaatgttagggtaatatataagacgtaaggaggtgctaaatgatgagtagcaatacaaaaatcactttaaaggctgctagagttaatgcaggattaagtcaaaatgaagctgcaaagagccttagttcatattttggtatgcctatctctaggcaaagagttgcttcatttgaaagtaatcctgataaagtaccgcctgcttgggcagaaggattttcaaagatttataacatatctttaggtgatatttcttttgctcataactaaacattatgttaggtaggaggcgacgaaatgcaagtaaattataattccgctgaagttagcagtgacttagttaggctcactaaagaagatcctttaactcagcaaacagtgaaaaaagtaattaaagtgcttagaaataaacacttaacttatttagaagctaaaagagtactcatttatacggacaaaatgattctagacagttttcttaacgaaaagcaggtttaataatgaataaaaattcaaagaaaaagccacagcctaaaaatactgcagcttcctcttcaaaaggaattcattctgaagataaaaatggttcctttggcatattgcctgatggctcaatttattcatcaggttcaagttcataatttgccttgatatggttcataggtggattaccagttacatgcctaagtaaaaaagctttatttccattgtcccattcttgatataagtaggagttaccaaatttatcttcgcctgctgattgggcaatgatctgagcactaaatggctttacgggtttaaaagtcattctttctgcaaacatgtaatctttggttaattcattaaatggaatttgattatatgaaatgattttcatatatagtcacctcctctctaatctaattaaattttatcagagaaaaggtgacctatttcccatttgagcaaaaagttgaaaaacttgaaagaaggtgagaaacatgactgatgaagatttacttgaaaagatgaaaaagtatattggtcgcaagttggatcaggacagtgatcctcaagcgatgaaggctatcatttctgagtacatgcacatgagaggagatgattaccgttgatggccaatggttggaaaacgcctaagcagatccaagaagactatcatctggcagataaaacttgggctacttggcgtaagaagtgtgaggcatccccttatagggatgcaattgtaagagtatcaacacggtcgacatttatcattgaaccgcgttggcagaagttcttgatctggcagtcaaagaactatgaggaaaaacatatggatccgcatttgcgtggtctgtaaaactaggagaaattgaactatgactagaaaagaaacagcaattgttgtgatgtacgtgactttaatcgctttagcggtcttaggactgtattgtgtccctgacgttcttgcaactgggatgtaggagggatgcacgatgacagaacaaacttttaacaacctgttaaagaatagcaatgctttgtttgaccgcaataatgacatttgggcaaaagaaactattttgaccaaactgcaaaaaaacacgctacctgaaatcaggtaacgtgtcaaacacataagataaattgataatccttaacaagtataccaccgtaagaggaaacatacatgccgaagattaaaaaagtttacaaaactaagtatacagtgattgataacgctgtaattgaagacacaaaactatcgtggaaagccaaagggcttttcacttacttatggagtcgaccagataactggaacttctatgcttcagaagtagctaaacattctaagggaagcagagatcaagtattaactggtcttgcagagcttgaagcgtccggttatttacgacgtagtcgtaaacgtgataagaatggccatttaactagtcagaatgagtggctattatcacaagagccaaatactgcttggattgctgaagctgcagaaaagaaggctaaaaaggcagctaagtctaaaactaaaaaaagaaaaacaattattaaagctgtgtataagtttaagttacctaagtcggaaaatccaacgttggaaaaacctatgttggaaaatccgacactactaaatactaaccagactaaatacttactagataaaatacttagtttatctctctctaaacctctccctaaaactagaactgtggataaatctccagctcttgattatgagagagatgaaaaactaaataaaataatttttaaattcaatcaagctagggccaagtatcatactccaattgtgtcattttcaaaaacagagcgtgatcaattagccagtgctatcggctctaaatcacttgaccaacttgagaagcaattagagccgatcattgataatgtggcaatttttgctaaacagtatcctgctggatactttatcagctcagttagaaatctaccggaggtaagcataaatgcataacgataagtccaataaatccaaaaacattagcaagaaagtgctggtttacttaccagccggaattgtaactactccagaatggctgtttagaacatttaccacgtcttcgcttgcaaatcatggaatcaggaaagcgactgaaggtcttaggacatacagacctaacggagaagtagaagctggcagcattgaattcgtagttcagattaatagcagtgatctggtcattagaattagtgctgatacgcctattgtttataagggatttaagaagtgggaggcacttgcatgaaaactaagagaatggttgatgaacagcgcattttaaatatcattacagcggctaagtttgttagctatgctccaatcgatcgtttaactgataatcaacatttatcaggtggggcaatgacagacaaaattagaatctctgcattgaattacttgattgataacattcgtgatgaagttggtttgggctttggagatgtaacaaataacctactgtcaagctcatcaaaaagcgaatcaagtcgctttgctaaagaagcaatgattatgggctggaattttgtgaaagttaagtcagcaatggaggataatcatggaaccaataactagtttaattattcatgctgaaaatcattcagaaagcaattctattcagaagcagggaatgattagaggacgtcgtttttacattaaaaagcaagatccagatccatttagcatgctttttggggcaatgtttggtggtgatatagtcaatcctcatttagatgcttacttagaagtatttccctatgagagatatcaccatgatgctgaagttgctgatagtacgtatgattttcgagattctcttaaaacggctccaggtggagtaactttcttcggagaattaagcttaaatggaaaaattttaccaggtgactttgttggttttgatactgcacactccgatacatcagggatgagccttgaaagctgtattaaggctttaattgcaatggcttatgaaattgaagaaaaggaggataaaaatgactactaaaagaaaaattaatcaaaataattgctatctttgcagtacattaaatgcttttcacgatggacctgatttatatgcatccacaatgaataaatttcacgttaacctaaatgaaatggatggcaaatggtacttaatgattaaaggcttgccttatcctattaagcattgtcctaattgtgggcgaagacttgataaagatgcaaagtttgaaatgacagattggctgtaagtgattggttattaggaggataaggaatgaaagaaaacaagcttaaactgtattatttttcacaagatgaagatccgtataacatgtacaacgaatttgcagtattggcagagtcagcagatgatgcttggacgcaaattcaaagaaaatctattaaggatgaatttaaaggacagagcttgagcatgatggatcttcatgattttgacgatgatcgttctcattacgaggtaaaatgctatccattagataaacctacggtcattgcccattactcatttggataggaaagtaaaattgaaaacgcaattaaccaaaaagatggaacgagctttagtagctgacgctttaaaaaaaagaaaccatccagctcttgaagtcaaatattggcatactgaatcaatcggtgcctttacttacagacctgttggacaagtagaatacattgatgcagttattgaaaaagatggaatgtttagctgcatggaacttaaagtttctatgaaagatctgcattcaaaagccgctcaatcatttgtaggaaacaaaaactacttggtttgtcctttagaaatggcaaaagagattaaagcttgtaatgattcgtggcttgaagatcatccaaccgttggaattataggatgggacgagaaaaagacttttaaagttgttaagcgatgcaaagtaaaatatcttttgcctgaaaacgattggatgactttagctaaaggcatgatttcaagtatgtctaaagaaatgaaaggatatggaaatgaagattgaattacaagtcggaacaagagccactactaaagacttcagaaatacttataaagctagatatttggtggaacatggctggagaattgactcaatcgtaaagccttatgttcctggattaactactcgtgttgacttagtttcagtaccaaccaagtatggtcagttagtagttaaaaatgaagatatgctgacttatgtaggcaataatgtgtgggatgtaaggagagataaataatgagtaagtacagaaataacgcttcagccttaactaaaggttatgaagaaatcgacactaatctagatcattacaaaagttcatcttttaaaactgaaaatgattatgttgaaggcgtagcaatctacaccatggatgggtcagttttcaagttcaaagatttaaccgttgatgatatttatgatgcaataaatatccataaagatagatggctaaacatcaacaatggtggccaagtaaatcttggttatgtaatctgttatcagccttggagattttataagcatgatagccataagagaaagtattgaggcgatagcatgcaggaagaacatagaactaagaaagtcaagattgatattgacgatattagtcaaaaaagctggtcttatgggatgcaaaaaattgctaagcaaattattgcacaagcatatggtgtcacacctgatgcaattgtaattacctccactgatttaaaaagattggtgtttgaaggctacaatgcgatggactggaataaaaagtttgcattgcaattgaagatcacaccacgtttaaaggagaaaatttatggtaaccaccaagaagacaacgactaaaaagaaaactactaaaaaagttgtaaagcaagaaatgaaggcacagtcagtcatttcatacaaatttcctgactcaagttatactcttacagctcttacaccattttctgctgattcacttattgaaaaatttgaaactggactaaaagaagatggtgtattttcaactttaacgggcttagattctgattttaatattgttcctggagagcacattaaggatattaaatattgggtttcatttgggattcctgctaaatatattcgtttcattagtggtgttccaaatgaatgagcataagcaaattgaacgccaaaggtggcaaacagccattcatttaattcaaaaatgtgaagataaatacggttctattactcaaactccagaagatgatccaaattttgtaaaagttcagcgtatttgtggagcaaatctaagatcgacagaaatagcttttagaaatcaagaactaattgcagaaaaaattgaaagtggttttgctaagacgtatattgttaggcattatcatgttgctccagatacagtagaaaaaattaaacgaaggtttaatctgtcttttaaacccgtgtggttatatgttttgtataaagacaataaaccaatgtatttcataagatctaagaagctagatataccaattatttttaatcgtacattttatagtgacaaaatactcaagtcgtttttattaaataatgggtttaaactgagggcaagaaaagtaatatggcataatataccaattggagcatattatgttactccagatcataagaaagtaattcaaaagattaatgaggagtacagagaataacagcagaaagtgggatgcattgtggagctagatattgatgttgatgaaacactagataagactcgtgactttttagaaaaagatttgggtgagctagcaagcttagctgatcgtgatgtaacgtctttatctagtccacaattatcttttagttgtagtcatggcggtactaaacaagcagatgacattttaattgatcattggtctgctgatattgccttaactgcaatacatgctgcagtacatcatattccgaatgaagaacatgaacgtgacatttttattcaatgttactttatgcatcgaacagacaaagagatgattgatcgatttgttatatctcgttcaagtttgcgtcgaagaaagaatcgtgccttagtagagtttgcaagacgattggatgtgcagaaaaacaatcctaaccataattgtgattggcttgaaagcttggtagtaaagtaaatcatcgattaaggtgaaccttaagtgaatcatttttggaccctaagtgaaccctagatgaatcattcgtgaaccctaaatgaaccctaagtgaatcaaagttgaatcatttttgaaccctaatccgttgtaatatgatagtgtcgaatgattagggaaggatcattcgatgcggtatgtaatcttacgagcggaagatcttattaaataagtcctccttaagggatgcatatgtatcaattgatatgtgtgtatccatcttcagagcttagtctaattggcaagacgtcagacattgcctgtcgatgatgcaggttcgattcctgcagctctgtttgctacccaattgttgtggtcttattcaattgataaaatgggtagctcttatgaacttagtacaaaggtagtatgttggattccaaatccagagatgtgggttcgatccctacagttcgtgttgatcacgtgtttgcaatggtcaacgtaagcaatcacaatttctgtggttgcttatttattttgcaaaagaaaagaggtagaggcatgcagctcaagaaatgtagatattcaacatgtaatcagttaatcccatttgatcaaaagaatccgttctgtaaaaagcacggaaagaattggcatcagcgcaaatttaattatcaaaaaacaaattacaaaaactacaacaaatatcagcgcgatccggttgcgaatgccttctatcattcggcaccttggcgccgtttatcagttgatctaagacgcaaatctatgtggacctgtgaatgctgcggtcatacttatgacgcaaaatcatttttggttgttgaccacattatcccgttcaaagttgagccgagattaaaattagaccgtaaaaatctgtgggttctatgcaaaaagtgtcacttttggaaaacaaagctggaacaacaaatttatggtgcatccctaattgccaatttagacacgagcaaagcttggccacgcaaaaaaattcaaaattggattttaacgcgtgagaaaagcaaataggcccccccgtgggtcaaatcgattgagagcacgcgccaagccgtctttttcttttgagcgaacagtaattaaactctgataaaggtggtttaaattatgggacaaataattggagtcagttttttacttttaggcctttttgcattgattcaggaaggaaaagaataatgctacatcgtaaaaataaaaaaatattattaattataactttgatagttttaattttcggattatcggcatgttcaagcgattctgcaaacgataattcggatggagaagatcatgggataactttaatacctatttttcgttcagatggcagtactgacatgttatttttaccgtattaattcaggagggaaagaagtgaaatattttaaatttggtcatggaaaatggcattgtacaaaatatttaaaaaataaggtttgctttagttctgatggtctgatttattgtgatttcaaaggaaaaccagctattggaatattaagtaatggcaattattggaaaagataggagatgattaggtggcaaatatcaaacatgctggtcgtaaacgaaaattaaatgttggtgatgatgaccgtccttatcaaaaacgacagtcaaaaaagtttaaagaaatgaacaaaactttaaaagaagtccaacctacgccacctagtcatttagataaacatggaaaatggttgtggcgtcagattgtacctgaactacagaaaattggtaatatcaaatatcttgatcaattgaatttagctgctctttgttcagcatattcagatttcagaactgctgaagaagaaattgctaaagttgggccttatgttatggcgctagttgatgtcccacaagttttggaatatcaaaatgctaaaggaaaaaaagttcaaaaaatagttaagatatccaaggaagttcaggacaaatctcgccctaatccaatgttttctgttaaaaatactgcagaacgaacaatgaaaactctatgtgccgacttaggtatgagttttaatgcaagagccgcagcaaatattgagagtgaaaattatcatgctcaaaataaacatgctgaaacaagttcaagatctcctttaggtttggtgaagttcaatggagtatgatttaacagaaattaaaaatattaaaaagtatgtgcgagagagcgattttaaggtcaagttcactaatattgctaatcaagtaaccgattatggtactaaatttgctgctgatgtattgctaacagatgaatacattactggtagggatgtacaattagcagcatttcgtcacatgaatgatctttctttacaaggaacggatgattttccattcacttattctgaagaatacgttaatgcaattgaatatttcacaagaatacttccaaatccacttgatttaagtcagaaaattaagccatatgggtttgaaagttttttgtttgattcaacacttggttggcgtgatcttgaaactggcggatcaagatttcatgtagttcatttttctacttcaagaaaacaggctaagactttttgcgccgctgttttactaaattttggctattttgtaatgggacttcaaggatctgcacaagatttcttagttgcatctgtagattcagaacatgttaacaagttatttgattatatttcattgcaagcgcgtcaaattattgagttacctgattttcatgatgaatgtaaggctcaagacgttgaagttcagtcaacgcaaattatcggtcataaaaatcgaaatattgtgcgtaaaggtactgcttcaggtcgaaattcttttgattcgaaacacgatttgtttgctatttttgatgaaattggtggattagatccaaaatatgatcaaaaaatatcaaatatcatgatgggtcaaggtgataatcctaatagattattggtaaaaatctcaactgcttatcctaatccaaattgtgcatttaagcatgaagaagatagtttacgtaaggcaattgaaactgattctcatgatgcagatgatacatttttccttaattttgctcaagatagcgaaaatgaggtttttaagcctgaattatgggaaaagtcgaatcctttgctacatgataaagcatctcatgatcaacgattaatagggttgattgatttaagaaataacctggaaagacagggaaaattaagcgattttgctaataaatcaatgaatatgtggtcacgccagttccaagattcatatttgccattgagagatattcagaaaaatataatttctgattttaatattcatggcagggatgtatttattggaattgatgcttcaatgtctaatgacaataccgcgtttggtatgattttcccttatgatgaccataaatttcatattgagcagtattctttcattccatttgcccaagctaagacaattgaagctaaagaaaagcaagacagtttaagttatcgcaaattagctcgtcagggcttctgtgagattactaataatgcttcaggtacaattagctatgaacaagtttggaactggctagaacgctatatttcatcaaatgagttaaatttaaaagcaattgtagttgatccagcttacttaacttggtttgctaatcgtgttgaaaattatcaaccgaattggccatatattccatttaagcaaacttcattgcagcttaaccagcctacaaaaggactgcagaaagcatttattgatgagaatgtgtctttacttaaggatcctttgttaattgatggcttaaataatgcagtattagttgctgataaaggtggcatggttaaaattgaccggcagaatcgagttagtcaacatatcgatactgcagatgctatcattaatgcttattctcaagcacaaaattattttgaggactttaatgatggcaaggatgtgaagttgctcgatacgatgaatcaacagcagcgaaataactactttaagggcttatttggggtgtaaattatgattaataaatttattcaaattcttaaaaatgtatatttttggtattttcaaacaattctctttattgcaggctttgttgtgattaatattgctatctatttaattaatgcagttgccggattatttctaactgggattactttaattttattcggtattattatgaatcatgatcgtcaaaggagatgattaaatggggcttctaagtagggcatcacccaaatttgataacaatgttcaaattccttcaatgcatggactggtttttactcaactgattggtaatagctctgtttctatggttccaatgtctaaagcaatgctgaatagtgatgtttttagtgcaattcatcggatagcttcagatatagcttcagctaaatttaaaactgataacacttacattgaatacatattgaatcgaccaagttccattattggtcgattttctttttggcaaggtgtcattagtcagttactgctagctggtaatgcttatgtagttgttgatggtatgaatctagtgcaatatcgaccaactgaaataagcaatattcaagtaattggtgaaaatgtaggtattgaatatacagttactccactagatggtagtaaagaatttaaagtagatcaaaatcacatgctgcattttagaattatgccagattctagctatcagtacttgataggtcgatcaccgttagagtctttagcgtatgaaatgaccattagtgatcagagtaaaaaagcaactttaaactcagttcagaatcagatcagtcctattgggattcttagtgttccagcatctcaacttaatgatgaagaccgtgagacagctagaactagttttgaaaaaatgaactctggggcaaatgccggtcgactaatggtacttacagatgattttaaattttctcaattagatgtgaaagctgatgtctttaaagctttaacggaaaatgctgactattctgctgcacaaatttctaaagcatttgggattccagtagacatgttaggtggaggaaaatcgaccgaatctcagcatagtaacatcgattcggtcaagggtacctatattgcggacttaaactcttatactaatcctttacttgatgaagttagacttaagtttgattgtcctaacttaaaattggatatcaaatcggctcttgatgttgatgattcaattgctgttggtcaagctaactcaatggtacaggctggaacaattgaccaaggacaggctcaacagttgcttaagcgatcaggtactttgccagttgacctaattccgccacaagaaggaggtgatgacaatggaaattgatattaaaggaagcgtagtagatagtgaaactggacaaatgtttaactggtttgggatgcaaaatactaatccaaaagatgtacaaaatgctttaaataaagctaatggggaagatattgaattgaatatctcgtccggtggtggagatgttgcttcggcggctgaaatctatacaatgctacagcaatatccaggtaagattactggaacaattcagggaattgccgcttcagctgctagtgtaatctctgaagcatgtgatcatttagttattagccctgcagccagcatgatgattcaccgagcatcaaatacttttagtggtaatactgaagatatgggacataattcagtgattttgtctaaagtagatcaaactatttgctcggtataccaggcaaaaactggcaaatcaagagatgaaatcttgaatttgatgaaagatgaaacgtggatgactgcagaggaagcggttgatcaaggctttgctgatgaggttttaaatgtctcagataatgcgcctcaagtgattaattcttttgaagaaattccagttaaggctaaagtagatgaattcatgaaaatgctgatgaattcagttaaaaagaataatgaaaataagagcgataatactcaatcttctaatcaagatagtattaccgctctttttaataaaaaattatcgattttaaaaggagaatagaatgtcagatgtaattacgcgagaccaagttgaaaatacctggaaaatttcagctgcaaaggtctcagacttaaacaataaaatcaacattgcattatctgatccttcagcttcttcagatgacatgaagaaattgaaagacgaacgtgataaaactgttgaaatcagagatactgctcaagagcaattagctcagtttgggatgaatccaaatgaagttaaaaaaactaggaatattttggatcgcgacagtaaagaagatcatactaaatcaattagagatagtatcaattcattcgttcacgccggtgcatctggtcgcaagtatatcaacgatgcaacaaattctgatgatggtcaaattacttcaccagttgtagcgcccacaattcctgagactatcatttatgatccatcaaaggaagtaaactcagtagtagacctatcaacatttttaactaagacaccagtacctactggaagtggtacagcaccaattattaagagagcagattacagctttccaacggttgaagaattacaagaaaaccctaagttgggtaaaccagaattctcaaatgttaattggaaagttaagactcatcgtggcgccttggccatttctaatgaatcaattcaagattcaagcgtagatgtttctgacttaattcttacacaaatgggtgaagctagagtaaacacctataataaatctatttctgatgttttgaagaagttcaatgcagtagaagatgcaaatgctgataatctagttgatgtttacaagtatttgttaaatgttgcgttagaccctgcatataatccagttattattgcaagtcaatctatgtacaatgctcttgatactcttaaagacaagaatgggcaatacatttttcatcaagatgttactggcaagagcggtgctaatttgcttggtgttccagtctttaagattggcgataaattacttggtgaggcaggagagtcaacagcatttatcggtgatatgagtcgtgcggtattctttgctgatcgacaacaaatcaacctctcatggcaatataatgaagtatatggtcagtacttagctggtgctttacgttatgatgtagtatccgctgatccaaatgctggattcttcttaaatgctaagttaccagcaagccaaatgtatgtaccaaagattactcctactcaagatgcagtacttaatgttccggtattgggggataataagcaatcagatgaaaaagaaactgatcccgtaacacactaggagtgatttaaatgactgattcaactggcgtaactgtaaacgacttacgggattacttggctagtgatgcaccggatgaatttttgcaacgcctaattgatgaagctgagtatgatgctcaccatatcgtaggtgacgacattccgattgagcgttgccggcagaaccgtgattttaaccaagctgttagaatcttagccgactatgataatgcatcacgtggtgcacaagacagtcaagcacacgcctatcctagatcatttctttatcgaatgaatcaatgcaaatggtcattgaggagggatacagatggctctgaataaatttactgggcgtagctttagtaaatcaattgtttttggcacaagtgtaaagacgagagacgaaaatgatggttctgagaaaatgacctttaaacgtcttctagggccttttcattgcgctccatatattcggacgatgcatcagaattttgaacttatgggtaccaaatattcaagtactcggcaagtatcagttaatcatcaatgggttggtagcaaactgactcgcaaaatgaaatttgcgttgcttgatggtgaaatttatcaaattgttgataatggttctgatcaaacagataaccctaatggtgttgatattttgagtttgcaattagctgaagatattgaaatgccagaagaggtgagtgaagatggctagctttgaagatcaattaaataattatcgtaaacaattgtctaaattggtaccgaatactgaacagaagcttaaagctaataaagcaggtgcggaggtctaccaaaaacgtcttgctgaggttacaaaagcaaaacactattcaaacaaaaaagatgaaaagtatggtcacatggctgatcatattgaaatttccgataaaaatagtgatgaagtagctgatggcagtgcaaccgttggttggccaaatcgatatcatgcaatgaatgcgatgcgtttaaatgatggaactgttcacattaaggctgatcactttgttgatattactcgtgaagaaagtaatgatgcagttgttgaagctcaagctaaggcattgggctttaagaaaggcggctagttatgaagttgccaattgtacaagttgctgacttacttgaagctgctaactttggttgggttgatccagaacacatctatactacaaatgtcactcccgatgaagatgattctggtaaaacaacatttattcgcattcaagacgctgtaggccgaatggcttactatgctaatgatgtagcctttgcacaagttgttggtgtagaggttcaaatatttttcagcaacaaatggtcaaagttgaccaaagatgaaaatttaacaatttatgatgcaaaagtcgcagttttgaagaagttgcaggctaatggttggaagattcaaaatcctttgaatcctgacacacctgatcctgatactggtcaaaaaactgcgactatttatgttacaaaaattttagaaatggagaattagaatggcagatacacaaacgactcaagaattagggtcatcaagtcatggtattaatctcgttacttttgcattgcttaatccttcaactggtactgttttaaccggccctgatggtttgagtgataacgggattaagccaatttatcaaggtgttcaaggtactacacaagccgaatatcaaaacctagagcgtgaaggtactaagcaatatgctaatgacacgcctaagcgtgttactcgccctactcaagcacctactgcaaacttaacgtttctcgacattgcttgggacactcttaacaagttaactggatatgaacaaggtgaagatggtggttactcactttctggtggcgctaagccatattttgcaatgctcacacgtgcaactttcttggatggttcttctttatatgaagcttttgcatgtgctactgcaattttaccaactggccaacaccaaactgataatgactcagaacaagatgcaaatgttgctttaactgttgatgcattccaaccaattaatcctgatgtttttaagcttaagaatgggcatcaaatgccttatagacgctggaattctttagattcaaagtttgatcctgaaaagatgatggcacaagttttccctgggtataaaccggatgacacaatgaagattgtggtacctacttggaatggcacgtcagttgctactccaagtaatgtaccaagtgtccaacctaagtcagataagtaattgaaaagtagggtgggtgtggtaggaaaactaataactatttatcaaggaacgggttacccgttccttttctttcgaaaggattataaaaatgtcaaaaattattatcgatactaaaattttgccaattaaagttgatcaagttgaattcgttcttacgggtgcagtaggtgacatttcaagagagaccatgattaagcttttggaatcagctgatactaagaaaaatgaaaagtatgttgacttcattaagcgacaagcagatgccaaaaaagctgcacttgacttgttaaagttagtcctaggtttatcaactaaacaaattgacaagatcaattcagaattggaagaaagcactattgataattatgttggttacgttgagtccttacttcaaggtttagctactggttcatatgctgactttgaaaaggcgcaaaaagatgacggtgaggaagtcacagacccaaaatccgacgaagacgacgattaaaacaaatcaacgatttaaaggttcaagggcttcattataaaagattaaaacgggatatgttcttgatgcatgggacagatcctaaattgattgataatactgattattttgacttgatggaacttctaagcacaccagatgaagatccaatattctcagcttctgaacttttgagtccatctgtaaatcaagaacagagtttctacgatcaggacgacatttgggctgatgagtagatagaaaggaggtaaatatggtgaaaatcagcaacataatgtcgaccacgatcgacattaatacaattaaagcttctaattcacttaagtctttagatagcgccattagagctacaaccaatgcatggaaagctaatgaagcacgtgctaagtcagtgggtagtgcccttgaggcgtctaaatcacggtatgaaggtctaagcaaaaatattgaaaacgttaagtcaaaaattgggtacttaacggagcaacaatctaagcttgaccgaactactcaacaaggacaagaagagtacaataagtatgctaataaattagcgtctgctgaaaagcaacttgcttcaatgactgctcagcaagaccgagctaagcggtcaatggactatcaaaagacggggctagctggactgcagtcgtcttataagttgctgaatgaattaggcaatagccgaattcagcggcttgaagctgaaggtagacaatatgaagctaataagactaaattggccacttatcgtgcgtcaattactagcctaactaaacagcagaaactgcaggctgatgaactggttagaattggcaaagcttctggcgaagctagtgaagcttataaacgtcaacaaattcgcttaaaccaaacctcaactactttagcaaaaactaaaaatgagatgaatgaattgtcgggatcaatgcgtaaagcaaacccgacttttttagatcgtattaaaagtaaactaggtagtgtcaacaaagaagctggtcaaactcataagacttttaaagaagtatttgctgggtcttttattggcaacgctttgtcaaatgctgtatcaaacttaactggtaagcttaagggtgcagttagtgaaggtatggcattaaatgccgctactgctaagattaatgctcgttttaagagtatgggcatgtccgctaaaggtatcgagaccttagataagcaaattggtgatttaaagtctcaaaccaatatgactggtgataatgtagccaacttgcagaccaagatgcttaactggtcaaacattggtactaagggtgccatgcaaatgactaagatgattgctggtgtcggtgattcatctaagttatctggtgacaaaattgagcagatgggtgctagtttgatgcgtgtcgggtctactggtaaggtgacttattcagcattaagccgagtcaccaagtcagcaccaacctttatggcacagttggccaaaggtgccggcatgtcagaagacaagcttaagtcagtgcttaaaaccggtaaagttacgcaaactcaattccaaaaatggatggcgtcagctgctaagtactctgatactgcctttaaaggctttagctccacgcaaggtggtgcgcttaagtttatgcaagttagatggcaaaaacttgagcagacaatgactaaaccattgtttgatgctaaaacttcaggtcttcagtctttgaaagacattatgagcagtccggaactgcttaaaggtgctacagcaatcggcaatgcattgtcatccacattaggctatattgacaagcacaaaaaggatatagcaggtattacttcagatattacacatattgctgttcagttgggcaaagatgtgtggaaagatatctctgggattattggggatattggtaagtcttttggtttaattcatgataatactaagaagactgaagatcctcttcacatggtcaagcttacaatggacggcttggctaagaacaagaccgcaattcaatggattagtaaagccattgttgcaatggctgcagttaaaggacttaaagcagtaactagtccgcttgttggattagctaacattaaaattggtgataaatcgctaatcgggatgttggccaagggtggattcaaattcggcaaagggatgcttcatccaattaagtcaattactaatacttgggataagttcttaatccatctttcaaatggaaaaactagagttggtaaaattactgacgcgtttaaaactggtttttcgaaaattggcaagttcggccaagcatcgtggagagttattagtaaagcttggggcaaagcaagcgatctaggttctaaagctggtaaaggaatcgttaaaggcttcaaggctactggtcatggcttagcttttgctggaaagtggagttggagcaaaattaaatctggctttggtactgctagaagttttggtcaaactttaggaaagcaattagttgctggattcaaagcatcagtaaaaataggcaaaggtctttttactcaaaaaggtggtgctggcatctttaatggtgctttacagtccactaaatccgcaggtggttttaataatttaactactgcaggtaaagttggtactgcagcggctagtgtaggtgttgttgtagatgctgcaacttcaattgtcaaaggtatcaaggataaggtcggttcgcgtaagcagtatgaagacatcggtactggtgcaggtaaagctatcggtggtggtatcggtctttggtttggtggccctttaggtgctgcaattggtgcaaaaattggtggtgttgtcggcaaatggggcggtgacgctgttaagagtttccagaatggctggaataagaaaaagccacctaagaatttctggagcttggaaaacctcggctggtctgctcatgacacgttcaataaaattggtaaatggggttctgatgtaggtaagaagtttggccaaagtctaagtaaaggcaagtcatgggttaagaaaaactcaaaagaacttgctttaactgcagttaatccgattgccggcattcctactttactttataagaacgatcctgagtttagaaaatgggctaatggagttggtaagactttcaagaaaggttttaattctgcaaagaagtcagtaactaatttcaataaatctgtttctaaaaatgtaagcaactttaataagtctgttggtaaaaaatatagacagattacaagtggcattggtaaaacctttaagaagggttgggatattgcgtataagcacgcttcaaaaggtactaaacaaattatgcgtagtactgagaagtttgctaagaactatatcaaaaccaacaagaaggctaattccgaaactgctaaaaactttggtagctttagcaaacgactaaagaagaatcatggcaatctttttaagacgcttggccaaactgcaaaaactcaattaaagattgagcagaagcgttggtcaagtaattggaagaatatcaagactactgcagctggcatttggaaaggtttgaatcaaaacgcttctggtatgtacaagaagcttgatactgccacgcatggaggcttaggtaaggtctttaatggcttcaaagattttggcaaaaatatcaaaaacttttgggatggcttatggaaaggcattactaagacttttgatgatactgtcaaaggtcttcaagatgctgcaggtaatatccagaaattctttactggtaaactaaaagttagcaacattcacctagccagcggaaccgattggaaaaagaagtatggctatccagctattttaaatgatggtcatgattcacctgctacaggtaaccgtgagggcttaattcatgctgatggttcattagagatcttacgtggtactaatattaagcgctggatttttcctggcgaagatgtaatcaatgcacgtgacctagctactttatttggtcgaggtgttcatttagctaatggcacagttcatttgtctaaggatcataagtattcgaagaaaaattatgaattagctaaaaagcgtgccattgaagataaaaaggaacttgaaaaattaggagataaaatctctaatgctttaaagcacagaaatggcaatgaagctcgacatcttactgctgagtttaataaacttactaaaaaatactctgcagataaaaaagcagctaaaaagcctgatcctcatgctggtaaggttttagttgatcaaggtttgcttattggtgcaaagagtagaattggccattcagtttacataagtaagaagctattcaagcagcttattgataatctaaataagaaatctaaaaagactaagagcaaaaagactggatcaactagaaaacgtagaaccactcgtcgcaaaactactagagccacacgaagacgaacaactactagcacaagatctactagttcgggtgtatcaattaaggcttctgtatctggcggttctgctgttacttcattggcttcggctattaaggcacttaagtctaagtcagttaaaattactgcaaaagcctcaggagtaaagacagttgaagctcttgctaaagccgcaaagaagattaaaggcggtagccataaggtaactgtaaaaacttcaggtactaaatcacttaaccagctttataaagctactaagaaaatcaaaggtaagactcatagggtcagagttaagacatcaggtacaaaggcacttaagtctttgcaaaagaatatcacgtcagttcataaacgcgtggattctctaagcaaggctgcaaagaaagataagtttggtaaatcaattgctaaacaggcagaggaggccgttaaatccttaaaaggtaagggtaactttgctaagcaatttgagtcgatgaccaaaaagttcaataaagacttaaagaatatgactaagaattctaagaaggaatttaagtcaatgtggtcagatattgaacatcaatctaaatcaggtcaaagcaagcttactcatgaaatgagttcattctcaagtcgctacaagaaagattggggttcacttgaaaatggaattcatagaactttcggtcaattctggtccaagatgaaaagtgcagctggtcgtggagttaataatgtcttaaaaattgttaactcggcgattagtaaaattgatagtgtgatctcggactttggtggttcaaagactgcagtaaagcaagttggcttggttcattatgcttcaggtactggtgtatttggatcttcaataagaagggcaattactaagcctacatttgctgttttaaatgatggtaatgattcacctgaaactgggaatagagaaactatttggaacaaagcaacaaatacctttggtgttgttcaaggtagaaacgttccgctgttgctcggacctcaacatgaagtctttaatgccacagaatcaaagcttttaggttttactcactatgcttcaggtactggtgcattgcacaaactgtatgaagttgctaagcataattggagcaatcctactaaaactggtaatttaatgtttagtgctgtctctggcttaactggtgctatgaaagaattggcttcagggatgcgctctaagagtaaagatcaaggcgtaacttggtggtctcaactgtggaagatggttgaggacaaagttgacgatgatgatcttggtccagcaactggcttgcttaaagctgttgaaaagtatggtgaaggtcatcgctatgtgtggggtgctggtggtccaacaactttcgactgttcaggattggtcatgtatgctttaaagcatgcgtatggtattgattatcctcacttttctggtgctcaatatgcattaactcaacatatttctaaatcacaagctaagcctggtgacttagtattctggggtcacggtggtagtgaacacgttggtgtttacgctggtggaagtaagtactattcagctgaaagccctagtcaaggaattcatatgaacactttatccagtgttgttggatatggttcgcctttatttggacgtgttaagggcctaaaacaagacagtgaatctaaagatgtaaaagttaaaacgaatagtagcttacaaaagcatattaaggatcaagtaggtcaaggcttttggagaacagttcaaaagattgctgataaatacggcgaatcttctattcctggaacagctacaccaaagcaagctcgtcaagtaattcagcgtgccatggaaatcgcaggcgttcatggtcaaaactgggtgaatggtttagcaacaattgcacaacatgaatctggttttagagatatcgtgaatacttgggatagtaatgcaaaagcaggtactccaagtgcaggctggttccaaatgattgagccaacttttaaagctaatgcgaaaccaggctataacaaatggagaaatccacttgatcaagccatttctgcaattagatatattcaaagaaaatatggtggtattgctcatgttccagggattgtatctatgcgaaatggtggaccatatcaaggttatgctaatggtggaattgttactagtcctcaattagcaatgattggtgaaggtcgtaggcctgaaactgtcattccttgggatattagtaagcggtccagagcatatcagcttatgagtgcaacgctagctcaatttaagcatgaagatgggaatgatgtagcagatagaagaaacggcaaatctgatgaagaaagccgagaatttagagaaacggttgttttgcttttacagcaacttgtagaacaaaaagatgataaaaaagagaaggaagagcacgactttatgcaaggcgtgcttttacttttgcgccagatctttaataaatcgtctgttgctgacattaagctcacaactcctgcgggcagaaccttgtgggaagttgtcgagccgtttagtaaggcagaacaaagagctgcaatgatcaaactaaggaggggattaagtggacgttgagtattcaggtttaatttttcaaggcaaaaattcgcgtgatctaggttttacggtgcaatatccgtttaatctagtccacccgacagctgaccttgatgctactcacatcaaaggtcgtagcggtgactttttgcaagatgataactcttatcagaatgtcactgagactttcactgttgatgctgttcgaccatctaatgtttctcaatttgactatgagcggactctgacggattggttggcttcacctgtaaccatgacccaaagaaagtatcaatatttacaatttgatgctgatcctgagtatgcttacagcgcgattcaaaaagaccctttcagcctgcagtgggatgaaagtgatccttaccacgcaaccggtacaattcctttttattgtgagccatttcagtatcgtgtcgatggtattgagtacattccactgccggatactggtacagtttataaccaagaatccagaattgctgttccaaactggcattttattgctaatgggacattcatcttatatgtaaatggcttgccttatgagtttgacaatatgtctggtgaattttggctatcaggtgacacgcaggacacttatgacaaggacaataaactttacaatagccaggttaaaatgcctaatttaagcgttcctatacttcaaccaggtaaaaatactatcacgattactgcagaatctggggcaacgatcactaaagcagaatacatgccacgatggaggaggttgatatagtgaaagttacaattggtaaaattccagagataatttatacccaatatgatgagttgctatcttttcctcacttatataaatctattaatagtgactttactactccaggctttactttatctgatgcactaacttgcgatgttacttttaatttcaatcaatatccaacattacaaatgacatatccacgcgatggaaatcatatggaagaaattcaaaaagaccgttggattcttgaagattgtggatataagtttccacatcaaaaattcaaaattactcatgtaacccaagagttggatcaagtagtagttaatgctgaacatttgttggctactttaaatgactgtactttaccagacggattccaactagttaatgcatcacctcaagacttcatgaaccaagctttaaaccaaatggttccggctaaagatattatctttgacagtaaagtgtcaaaggtaagtaatgtcaatgtggaaggagctcagcaggttggttctcttctgatcaatccagatcaagaaggagatcaggcagttaactctataccaggactttatggcggtgaattggagtttgataataatgaaattcatcatagcgaacatgctggcatggatactggaattgtcattgactatggcaaaaatatgtcagagtttcaacatgatatttcaacagaaaatatgtggactggtgctgttttcattgcaaaatacatcccaggtcaggctgttgctaaagcagattgggatggctgggctagctggtccagtgattactcaaacgttgggatttatgcagcaggtggtacggttgaaatctttaactcacctgttgaaggtcatcaagcaattggtaccctttcaacggggatgaagcttcatcttggtacaccaattcatgacggcgattttacatcagatggaaaatatcaaattaataccgttaacggtgatgactggtatcctgtcgcaccagaagatggtggcggctttgtggatgctagatggatcagttttgataaatctggtagctatatggttaacgacatcacaggatcacttactgttcaggctcaggatccaaatgactcaagtggagctggttcgcgtgtaagcatgtcaggtaatgcagtagttgcatataaaccaggtggagaaatccatgtctataagtccccagaaattggaccagatcacgttcgcattcctggttggactgtaaagaacggaacctcaattcactatgatatggtggaacgcaattctaacggtgatatgtggtatcgaattggtcctggtcagtggctttacggacctcacttgtctttgacgcaaaacggtgcgtatcaaagctacagtaattccggctatggctacatcaaaaagaatcaaactaagtatcattgggatagcaaacatcacaagatggttgctactactcatacagtgactacaggtggcaattctaagaaccataaatccggtagatactgggcttctaagaaaaagaaggttactgtacatgcccacaccggaagagtagaaattgataagactgttgttcaaggcgggaagacttaccaccatactaagtatggttgggtaagttctggatcgattgagtataaagaaaatgggtccatcaagccttcaagtacagatcaaattctaaaagataggctaaaggatcatagcaaagttgaaatttatgcaactccagataaaaacaatgctcttaactggtcaattccttcaggtactcaattggttgctgatggtcatgaagctaaaggtggagatggcaagacctatgttgaagtgacctatgctggtaaaactggatggttacctgaagataatattgattctgataaatctgatttggtttctccagatgcaaacgatgacgatagttcgaatcctaatccaaatgttgatacttcacataatgaagtaactgtaaaagttgggcctttatatgcagacggcttcggcaatgatccaaatattgataaggtcaacactgtggatgtcagctcatacttgaagcacgatgatcaagatttgtccggacagcaaccggatggtacttttgttgctactgcagatgacatcaagcaagtaacagatataggtaaaaactatatcatcgagcacaaatacggtcatatagatgtgcaagatacaatttcttatcaagaaatgtctgctttaaatgcgaataagacccaattgagtctttatgactatgtaactgttaagtatgacaagtatcatattaatcaaaaagaagaagtcaatgggtttgtttgggatggattggctcaacattataagcaaattacagtaggtagattgcctgaaagctggcaacacctgctactccaacaagctaaagatcaaacaagtagtgctgtcggtgctttcacacgaagaactcaaggctggcttaatcgctttgaaaacatgatgcatagtgagcgttccgaccgtcgggctaaagaaaatgccatgatggaagatcttggaatgatccagcaagatgttacctggaaagatgataaaggaaaagagcataaattaaaggatgttttccttgaaagtcgtaaggaatttgaagaacatttccagcaattagatgatgatgctagtgacattaagtcatggattgatcagccaggtgagggaatcatacaagcaattccaaattggcaggcgcctcaacaattgactgctagaagtagtaacggcggaaaaatggtgtttggtggcaatggcttggaattttatgatgaacgctcacagaaattgctaaccggtatggactcacgcggtaaactttatgctgacagtattgaaggtgtaaaagttaatgcgatggagattgatgctctacttatgcatggtaatcttcagagtgaagatcctgatggatcaatgaaaatttatattggtactcagaatcctggttctactcttaatccttggaaagatggtcgtgttatctgggttaagtcaacaaattacagttcaatggtaagttccggacaaattgcaactactagcggagcacgtactacccgtattcatccaagtgcaataactgttggatatagtggaaatgatgatatgaatgaggtactaacacaagataattttgccggtcatgcttactacagaatcaaatcctgggttcgtgcatggatagctgactggattaccattagaggcactaagcactggatttggaaaggttccgataacgtgaacatgggtaaattacgcaaccttaaagatcagggtaaaaataattacacttatgatccaggtagtaatgatgattggggcagtgatgaagctggcacattagatggtatcgacttggggagcatagtacttgacggtgaccttcaagcaatgaatcaacagtggcagaatgcctttaatgatcttaagaatagctatacaaatattactgtgccttcaacgccagatatttcgacaaatccagggcaaattactacagatgtggatagtacttcatctaaagcgggaatgcttaactatactgaagcatacaatcgtggtttaggtcctaagagtggtcattatactgaagccgttggtactatgatgggcggaaatgatggtcatatgtatgtattgaagttatatacgcctacaggcaataaacactggtatagagtccaataaggagaatcaaatgaatgataaagtggcagaaacactggcaattaatactggaaatatgattgcttcacttaatgttcaagtagcaaagttgcaggttgctcttaaagaacaaaaacaagtaaatgattctttgaaagaagaaaatgacaagctaaaaattgaaaacgccgcgctaagaaagaaggtgaaagcaaatgagtctagcgcaaatagtactaacaaccaacaagacaacaagtaatgtcggtgattatatcaggaaaattggacaaggagaacgtggccaaattttgccggtcatcgttgtggatgcaactggaacaccttacgacctatctgataaaaaaatagttttttcagagtcaaaagattctggcaagtatgttgtggacgatgggaaagcatcgacaagcggtaaattcactttgactgatccccaaaatggcaagttctcttatgcattgcaagaccaagtttatccggaatccggtacagcatggtttgatatcgtaagtgcagatggtacagtacttgatacaacggtaagttttagatttgtcgtaataccaagtgctactttacatgttaatgatgataactattcgtccacgcttgatgctttgcaagctcactatcaaggcgtaatcaagaacactgaaactcaaacacacaacctaattaatagcctgactgacaagattaatcaggctatttctaatgggcaaagagatgtggctaatcagctgactgacatgcggaaccaattgcaagctttgcacaatcaagaaaatagcttaattcagaattggactagcgagttcaatgctcgtaaagctgattttgataaattgaaggctgactggcaggcgcaatctaagtcaatttcggacgactatgcatctaaaaaagcaaaaatcgaatctgacgctcaatctcagcatgatcaaattcaggctaaagcaaatcagcaactccaagccaaccaatctgctagtgatgcagaactggccaaaattaaatctgatgcacaggcacaacatgatcaaattgaaaaagctaaaaatgatgcaattgcggagattaccgctcaaagggatgctacgattaatcaagcaaatgctgactttaaagctaagattgatgctctgcaaacagattacgatgcgtggaagtctaccacactagctgactttactaaacagttagccgacattaagaccaacatcagcaatgatcaatccacgctaaaagactttgatcagcaacttgattacaccaagcaagaactggctgatatggctaagcagctggatagtctggaccttactaagtttgtgactggtgatcagtttaaagatgctatggctaaaaaggctagtggtctaaagattatgggattaggaggcgaatatgtcatggcagtagatcaaagcgatcaaaacatcaatggtttgcctaatggtgttcaaggattggctgacattggagtgctttcaggggctttacaagtactagctgatgcgattttggacaagaatcactataccaagcctgaagtagataagatggtcaatgatgctaaagctgcaatcatgaataccgtcaacaccaaggctaatgcaagtgatttaaacaataaggctgacaagtctcaaattcagtccttaagttcacaattagaatcttataaacaggaaaacgataatcttaaaaatgaaaattcacaattgactaaccgattacaaacactagaaaataaacagtttattgcgcatgttgccagtgaagaccaggtagcaagtcaatcagcgccaattgtcatcgtggatgactagactagaaaggagattttatgagtaaactttttattgataaagtcaaatttaatccatttgattttcatgaattaagtgcagctgatgatatgaataatattttacgatcaggcttttacgttactagaggaactaaccctaaaaattttccaactgctgagataaatgagggacgctgggctacggttctcgtctataaccacgataatggtcaaatcttacaacaatggattattcaaggacgaacatataaccgctggctcactacacctggtaatggcattggtgttcctacaactgattggattaaagttgctacacaaactgacttagaatcactacaatctcagattaatgatctcaagaataaaattgggggggtactcactagcctatatactaagcttcgtggcaccttcactagtttggaggtggcttagatgagtatttacattgataataaaaagctattaagcctacctgatctcgctggtggaggagttaatctctttagaaatacctatgattttgctacttggcaatatactccaggcaaaggtgattttgaaccagcttcaaattataatagtgattccaaccatgaattcattcaaactaaaaaagttgctcatttatggggtaacaattctactgaagcaaagcttttatatacgcagcccttacatttggaaaaaggaacttatactgttagctttcttgcaagagacaatggacctgatccgaaaaattcgtcctttgggcttgaattgtattctagctatacaaatactcacggtggaaatccacatgggatgactaagagtaaattatctaatgtttggtcttcatatagcattacatttgctttgcctgagcagttgactttagcagatattagcttaggtcactggggacctcaagagcttataccaggcggttcaatatatttgacaaatttgaagcttgaaaaaggacctgtagcaactccgtggagtccaaacccattggatatactagatgaaattgaagcactaaaaaggacctgtagcacctccgtggagcccaagcccattggatactgaagacatgctggattctctaaatcgtaggttcaaaattattaaagatgataattttgacttaaatgataagttctcaaaaatttggactaatggtcataagttgaaaaatgcaccagcaaattttgacatctatgcactttatatccaattcaatgtagacgaatacaactggttcgaaattggttggggatgtaaaaaccaaattgcatatcgaactagatcaggaagtccgctcacatggagtgaatggaagataataggatagaaaaaatgaaacagaataattcaagaccgccaccagcggtctttttgatacaaaaaatcactagctacagaaaggaaaacattatgacagaagaaactgcaaatacacctgtacaaggtgcagaaaccgaacaaaagtctaagactttaaatgacgtcttacctggtgaaggaaccaatttggtttacatttcaggcatgctgcaaggtcagcaagttaactgtgaaggaccaatcgaatatacgcgcaagcttgatcatccacaatggccatttattcctgctttaccacagtacgatccaagcaagtgtaagacaccaacgtttgactggggcaaaagtcaatggaaggacgaaagcgaagaggctagagttaagcagcttaatgatttaaccgaaaaggttgcttcaatcacaactgatgtgggcaagattcaagaaactcaagaagccgctgcacaagaaaaagaggctagcgacaagaaagatgatcaagtctttaagctaatttctgctatgaatgttcaattaggtgttatcaacactaagcttagtcaagtaacttctaaggacaacgatgcatctactaagcctgctgtatctgctcaaaatactcaaaacggtacaaccaccgaaggaggtgctcaataatgtttgaaatttataaaatggaattcgatattggaatcgtaaccgctgttgatcttaaaagctacattggtatgggaattcttagtcaacccgactatgaaagaatcgtgggtgatgaatcccatgaagaaagcaattcaacgtctgaagtccaagcttaatgttcgaaatagtgagattttaattggtctctttatcttgggcaaaggattatggctttatcatgacagccactactttatttatccgccgcagtttcaaaacattgaaaatagccgctatatcgatttagggctaatccttttaggtgctctactgatgataacggcttttttagtaccttacatgaagacaaccaagcgaaaaatacagctgattatcgttagcaaagtgtttttagtgttggctggtgttgtgtgtatggttttagcattactgcagatcacacacggaatcttcacacccttttatcgtatgggacactcagcatggggtgactttatcattttttgctttgtctatctgacagctagcgacgcctaaggaggtgccgcatgaaagatattggaaacgtgatagggtatctgataactgctgtcgggggtctaataagtgccatcacgcttttttacaaagcatttagcagcagtaagcaaaatacacttactagtatgttggcggaaaaagataatgaaattaagcagaaggctgaagatgtggagctttaccgcaaaagatggctcaaagttgaaaaggaaaatgaccgattgaaaaagaaattggaggaattagaaaatgacgattaaagacttgttagatttaggacttaacatcggtatttatgttgttgcacttgtggctgcagtttataccaaaaaccaagctaaaattaacaaagctactagagctggtaaaattcaagatttgcttgggtcatatgctaagaaggctgtatatcttgctgaagatgctgggctagacagtaatgatgccaagcaccaatatgcaaaagaactaattgtacaagcgttaagttgggctggtattaaaggtgtaacagttggcatgattgatggtgcaattaagactgcagtatcagcaaagaacttagcatatgatactgttggtgtggatgatccaggcttaagttatgatgtagatgataaagatatccttaagccagtagatcagcttgcaactcctgtaacaccagaactaaccaaggacgtgactgcagatggcaagtagagagtacttagttgatgtagctaactatcaaagtactagtatggcttcttatcataacgctggagcaaaacaaattattgctaagctaactgaaggacaaagctatatcaatcctaaagcacatgagcagatcaagtcagcgcatgctcatcatatgttcgttcatgtctatcactttgcaacttttagtaattctgttgctaaagccaagctagaaggtaaacattttgtctcacgcgctaagcatgaaaatatcagcaaaaaaagatttttgtattgtgattgggagattggagacgacaactcagtagtaggctcaaaggcttccaatactaaagcaatccttgcttttatgaaagtttgtcatgatgcaggctataaagtaggcttgtacagtagtgctagcttacttagaagttctattgatatcgcaaaaataattaaaaagtatggtacttgcatttgggtagcggcgtatcctcgctcaggtgcagtttcaacgccagattttaactattttccttcaatggacggtgtggctgtatggcagtttactgataattggcatggtttaaatgtggacggtaacatcagcttgattgacctccacaaggatagcagtgccaaaaagccaacaagcaagccagttgaaaagcctaagccgaaacctgttaagaaagtaagtgaagtttatgcgcctatcattcatggagatcctaagtggaatatccgtttattagacggtaaaggacattacatgagatatttgaaaactaactcaaattggaaagtgctagatactaaagtaattagaggcatgaagtgctatagattaggtaccgacgaacaatgggctccagctaagtacttcaaagtaactaaatataaataaaggagttgaaaaactcaaaatatcgtaaagaccgctctgggacaatgatcctagggcggtctttttttgtgtttcattggacacatatccggcgatttttccactataactaatcaagcaagttggcggtttagcagcaatgtttaaagatgaattttcaaactttcctgcttctttcctgcttacagatttataaaattatttttaagtcagaaaagccttggtagagtaggagctagaagaaacgatgtggctttttataagtaaatccttctcccattgcctcatttacctcaattattgaaacaaaagcatgtggatcttcttgcttgattaaagctttgattgatggaatttcccgcggtgcgactacaacataaattacacgtttttcattttgttgatagccacctaaagcttttagatatgtgaaaccacgatttagttttaaatcaatcatcttgccaatttgttcatatttgtcagagataattaataaaccacgggctgtgtatgcaccttgctgaacggtatccattactcgggataagacaaaagaagctaataatgtgtatagcatatgcttgatgtctaggtaagatagggatgcgaagagtactattgcatcacaagctaaaagcattttgccagacgaaataccaaattttatctgacagattcgggcaataatatcagttccaccggaagtaccattatatctaaatactaaccctaatccgattccagacaataacccagcagaaattgctgaaaggaagaggtcgtgttctaaatctaattgttttataataggtactgaatgccaaaaccataagaaaaaggaaagactgagcgttccccagattgtataggctaaaagacgtttgcccataaagcgatagcctaacaaaattagtggaatattcaatacaagggtcgatagtcccatgttgatgccccaaaaatgccgcagaagaagtgaaataccacttagtccgccgtcggctagtttattggggacagaaatcatgtctagacttaaagcgtaaatagcacagcccagcgcgatcatgaggatatcaattaagatacttttgtcaatcttacgcataatgattacctcctttatgtctttcctcaattttaacaaagtgtatagcaaaagtaataataaagacaataagaattgagattttaatatgataaagatagataatttaccagaaatttttaccaaggcaatgcccgtgttacagatattagaaaatgcaggctttgaagcgtactttgtgggtggttctgtccgcgatgttttgttacatcgtcatgttcatgatgtagacattactactagtgcttatccagaagaggtaaaagagttatttgataagtcaattgatacaggaattaaacatggaacggtgactgtcctttatggtggtgaaagttatgagattaccacttttagaacagaatcgggttatcaagattttcgtcgtccagatcatgtaacatttgttcaaaacttagatgaagatttaaagcgtagagactttacgattaacgctctggcaatggatacacgagggcaaattgttgacttatttaacggactagatgatctcaaaaaccatgtcattcgtgctgtaggtgatccagaaaaaagatttcacgaggatgctttgcgaatgatgcgggccgtacgttttatgagtcaacttgaatttaagttagaaagcaagacccaacaggcaattaaggataatcataaattacttaaaaaaatttcagttgaacgaattcgagaagaatttgtaaaattaggtttaggaccacatgctcggcaagcttttcaggtttttcttgatacaaatttgagtgaagatgtacctgattttggcgaaaaaaaagatcaactagctattttcccacagttaaaattcagtccaacgatggaaaatagtttgtggtcactgataattttgctattgaaattaccgaatgaacaaattcatcgttttatgcgtgactggaaaaactctaatgctatgactgagcaagtcgaaagaattattaatctatttgatttactttctagtcatgctcctagtgattatgaattattcttagcaggggaagagacattaattaatacgattgacgttgctcatattgttggtcaaccaatttcttcagaagctttagttgatcgttatatggctttacctattaaaaaagcgtcggaactagccgttgatgggagatttttaatagatcgcgggatgcgaccaggtgcaaaattggggcagactttgaataaaattcgagagttagttgtttcaggtgaagttgagaataatcaagaagcgattgaaagctatttgactacaattgaatagaaagaaaaatgtagcagaattcaactgctacattttttaaacataaagtaaaacggaaaagtacattaagattgaaccgagcataacaaataaatgccagatagtatggataaagggaacattgcgcatactgaacagaatcgcgccgattgtgtaagcaatgccaccactaactaatagccagaatccagttggacttaagcgaacatataaataagatcctgacaagataactaaccatcccattgcaacatagaggattgtatcaagtatgacgtgtttaccacgattgaagatgtagtaaatgatgccaaagatggttaggccccagatcaagccaaataaagtccaaccccaggctccaccaattgcaacaagtgaatatggagtataagatcctgcaatcaaaagaaagattgaggaatggtcaaaaatttgaaaaatatttttggcccgtgtaaaaactaaactgtgatatagtgtggaaaataaataaagcagtaccaggcaagagccataaattgtgaaagtaacaactcgcatcgggctgcctgtatgagctgcctttacaattaaaattactaagccggtaactgctagtccgaaaccaatcccatgagttatggcactaaaaatattatctagaaggtagtacctttctgatcgttgttctggttgctgccaaagtttgctaattttcatgaagtgtaatcaatccttttttcttctaatagttttttgatacaatacagtatatatgttgcttacattttatcataaatcgggtaaacaaattagaattgaaggcgaatacgttgtcgaagataaaagttatgacggactcttccgtccaattaacaccagaagaagttgaaaaatatgacattacagtagtcccattgacgattaccatcgacggtaagtcatatgtggatgggattgatatcactagaagtgattttgtcaagaagatgaatgaagcggagagcttacctaagactagtcagccaccaattggccgttttgttgatgtgattaaaaaattaaccgcagatggcagtcaagtgattggtattttcttagctaaatcattaagtggtacgatagatgccgctcgtcaagctgcagaaattgcaggtcaaagcgataatgttacaattattgactctgaactaaccgacagggcagaaggcttccaagttttggctgctgctaaggatgctcaggctggtaaaagcatggctgagattattgatcatgttaaaaagattcgtagtactcaaaaactggaaatgatggtagttaatttacaaaacttaatcaagggtggccgtttaggtgcactttctggtcgaattgctactatgcttaatattagaatcgctcttcagatgccacaaggtaagttaatcgtagccaaaaaaggacgaggtaagaaatttacacgtgcttttgatgaacgagtgttaaaagaaatcgcagataataaagagcatattaaagaagtaggcatttcgtacgttgatacacctgaattaatggaagaattagctgaaaaaattcgtgcaatcaatcctgcgattaatgttttagtggcagagacaagtccaattatcgcaacacatgctggcaatggtgcttatgcgatcttatattatgtggagtaattatggcttaccgagaaagtttttatcgatatttaatgacgcaaagggatgcagattcagctgatgacgtagctcaatttgcgaataatgcacagcatgacctgacttttcctaagcaagaacaagattatgagaaattgtcagattatttggaattgaatgctagttatttaccaagtatgtcaatttttgatcgtgcttatcgaatgtatgaagacaaaatgatgtattaagcccaagcctgatagatgcctgggcttttttattaagtgggtagaaaaatgcaggtagtaatttttattggttttattgtctttgcggtagcatttgcgacgattattcaacaacgctttttgaagagaatatcagttaattacattgcaatggcgattggagcggctattgcactagtaccacaaactaattcattaattgaggactttagctcggaattatttatgggcttgattgtagcgccattactattttttgagggacaacgtactaggttgtataatgttttacgttcgtggggcgcaatagttgggttaacggttattatgattatcttggcaactataactgcgggattcgggatctattttagtatgggtctctctaccactggcttttattctggctgcaatttcaacgccaacagatgctacagcaacagaatctgtaacacatggattgaagctgcctaagaagattgctttttacctaaaagatgagtctttgtttaatgacgcttcaggtatcattttgcttaatatggcagttgattggtacttgcatcaagaattacggattggacaagcaataggtaattttttatattctgcaggtggaggttttttctaggagctttggtggctactttattagttttcttgcgtcaggaaagttttcgctccaaatatcatttatctgctggtgttgcaatgccggttgatgtcatattctttttgacaccgttaataatatattttttagcagaagaaattcacgtttctggaattattgcagtcgttgcagccggattgattcataacgttgaatctgagcgaagcaggcttactaatgcctttattttttataacagtaatcaattatcgcaacttctgattgatattttaaatgggattgtctttttgcttttgggaatcatcattgttcggtcaatgagggaagacattttaatcaacaaacaattgatgcgattttgatcggaataattttatacctagctaatttgcttattagatacttttattatcgatttagcccttctattaaaggaaaaacgagtaataaagaagcattgatttttagtctgggtggcattcatggagcagttacttttgctttagcatatacgttatatgatttacgtattaatgtagcagatttccatttaattttggtgagtgaaattacgcttattttactaagtatgattgttccaacaattgtttttcacatgatcttggacaaagatatacctgattttgatcaaagaaaggaagttgatcgagttcgtgtggcaatgattgagtatgctatggatcaaatgaaaaagatctatttacctaaaaagattcgaaaacaattaaaattcgatttaagggcacaaatgaatcaaacttctatggttgattttgctagggaaataaagtatacaattaaacaaaaagaattacccgatgatcagaaagaatttagagctgaggtatatagatatgcttttagacaagaacgtgactatttaggtaaaattgcacaacaagagagaaaatatcgtcgaggctttctggctttatatagacagattttgatgtcagaagtggtgttcttagatgatgaaaatgattaattttagaaagaagagataatatggcaacaattcaatggtatccggggcatatgaacaaggctcgtaatcaactggaagataagttaggactgattgatgttttggtggaagtacttgatgcccgaattccgcaagcttcaagaaatccaatgattgaaggactagttggtaataaaccacatattattatcttaaataaggctgatttagctgatccagttttaacaaaggcatgggcagcagaattagctggagataataagtatgttttggcacttgactccttgcacaatactaatatgcagaagttggtttccttagtaaaaaaggcggcagctgccaaaacagagaagctagaagcacgaggggcctcaaatcctactattagaattgctttggcaggtattcctaactgtggcaagtcaacggtgattaatcgtttagttggtcagaacgtggctgaagtcggtaacaaaccaggtgtaactaagggacaaagatggctgaaaacaaatgctaatattcaagtgctcgatacaccagggattttatggcctaaattttctgatcaggaagttggttataaattagctgctttcggtgcaattaaggatagtgtttttcatgcagatgatgtagcattatttgttttgaaaaatttacgtgaattttatgctaaggatttgcttaaattttctaaattacctgaacagcaaattgctgatatggctgatccagatttgcttttgtcaatgactgaaaaatatggcatgcgtgatgattatgatcgtttttcattatttatgttacaaaaattgcgtaagggtgcaatcggaaggattacgttagatagaccatgacaattaaagaaataaaagagctgttgaaatctgaggtctctgaagcccaaattaacgaacttgaggcagatccgcgggccggcgtacaaaaattgttagttagttatcgtaagcgtcaagcaaaattactagcaaaaaaagaagagtttttgcgtcgcttttcttatgaaaaaaagttctgggaaaagggacaattagtagcgggtgttgatgaggtaggacgtggccctttagctggaccggtagtaactgctgctgtgataattgatcaagattttgatttattagatgtaaacgactcgaagaaattgagcccagagaaacgattgaagttatatcctaaaattttagcggaagcagttagtgttggtattggagtaaaaagtgcagaggtaatcgatcaaattaatatttatgaagctgaccgtcaagcgatggctcaagcagtacgagcacttgatgttaagccgaatgcacttttggtagatgcaatgaatgtgccagtaaatctaccccaagttaaattgattaagggagatgctaagtcgaattcaattgcggcagcttcaattgtggccaaggtctttcgagatcaattgatggatgattatgatagaatataccctcaatattgctttcatcataatgcaggatacggcaccaaggagcacattgaagccttgaaaaagtatggccctacgccaattcaccgcaaaacatttgctccagtcagtgatttttttgaataaatttcaatttataaaaaaataatggtctctttttgcgtaataaatagtggagggctttttttatgaaaaaaacagaatttctactaaaattaaaattgcaaaaagggattggttatgttaaattgctgacaattgctaatcaggtaactgatgaaacagaaattgaatttgaagaattagaacaaattgaattaactgaggaactaatggatgcatgctatcgcgcttttcaggatgatcagttggatcgaatggtacaacaaattgaacagcagtgtgacgtaatcagttttttcgatgaagcatatccagaaaaactacgtcaaatttatcgaccacctatggtattgtttacccgaggagatatttctttactgcaaaaagaaatcattacaattgttggctcacgctatccgactaagtatagtcaagatgttattaatcgcttggtacctaatattgtgcaatctggtcaggttgtagcaagtggcttagcaaaaggcgttgatgccttagctcataaggctgcacttttcaaccaaggaaaaacaattgcggttattggcaatggtttaaatttttcatatccaatgcaaaattttgctttacaagaagagattgtgcaaaagggactattgattagtgaatatttgcctgatacaccaccgcgtccgtatcgttttcctgaacgcaaccgtatcttggccggcttaagtcaaagcataatcgttactgaggctaaagaaaagtcgggttcactgattactgctaatttagcgttacaagaaaatcgcgatatttatgcagtacctggaccaattactaatgcattgtctgcaggtcccaatcaattaattgaagcaggagctacgccaattgttgattttaaatttaacaagataaagatttgacaattcagaaagtattagttatttttggactgtacccataaaataaaataagaattaaggaggcagttaatgcctactaaagcgaaaagtaaaacaacaaaaaaacgtaaaaagaccttagtcattgtggaatcacctgcaaaagctaagactattgaaaaatatttaggaagaaactatcacgttattgcttccaaggggcatattcgtgatttgcctaagtcacaaatgggaatcgactttgaagacgactataagcctaagtatatttccattcgtggtaaaggcgataccattaaagaattaaaaagcgaagccaagaaggctaaggatgtttatttagcatccgaccccgatcgtgaaggcgaagcaattgcttggcacgtagcgcacgcattgaatcttgacgaaaaagccaagaatagagtaacttttaacgaagttaccaaggatgcagttaaagaaagcttcaagcatccccggacaattgatatggatacggttgatgcccaacaggcaagacgtgtacttgatcgaattgtagggtattcactttcaccaattctttgggccaaagttaaaaaaggtttatctgcaggacgtgtacaatcagttgccttaaaattagtgattgatcgtgaaaaggagatcaagaactttaagccaaaagaatattggtcaattgatgcggaatttgctaagggtaaagaaacttttaaatctgccttttatggtgttgatggcaaaaagaaagaattgcctaatatcgattctgttaaggatgttttggctaaaatcgataagaaaaaggactttgtagtagataaagttgttgctcggcaacgtcggcgtcagccagcagccccatttacaacttctacaatgcagcaagaagccaataagcgtttaggttatcgtactcgtagaactatgagtattgctcagcaattatatgaagggatttctttaggtaagcaaggaacagttggtttgattacttatatgagaactgactctaagagaacatcaccagttgcccaacaagaggcttctaagtttttgcatgaaaattatggtgcagaatttgcagctaagagtcaacgccattttaagaatcaagaagacgcacaagatgctcacgaggccattcgcccaacatctgtatatcgcacaccggagtcattaaagagtgtcctaactacggaacaatatcgtttatacaaattgatttggtcacgttttttggccagtgaaatgaccccagctgtttatgatactgttcgtgcagatattgttcaaaatggtgtgatttttagaactactggttctaaattgaaatttgctggtttcaccaaggtttatgataatcaacaagaaaagaatgttgacttacctgatcttgaagagggtgacaaggtcaagatgactaagtccgataacaaacagcactttacgttaccaccagcacgctatactgaagcatcattagttcacgcattggaagaaaatggcgtgggccgtccttcaacttatgcacctacaatagatacaattcaacgccgctattatgttaaacttgatggtcgttcaattgtaccaactgaattaggtgaaattgttgatggcttaattgaaagcttcttcccagatattactgatgttgattacaccgcccgacttgaaaatgaattggatgaagtcgaagatggtaaaaaggattgggttcatgttgttgacgaatactatcaaccgtttaagaaagaattaaataaggctgatagtgaaatcgaaaaggtacaaatcaaggatgaaccagctggctttaattgtgatatttgtggtgcaccaatggtgattaagatgggacgctatggcaagttctatgcttgttctcgtttcccagattgtcgtaatactaagccaatcattaaagaaatcggtgtagtttgtccaaaatgtggcaaaggtcaggttgtcgaaaagaaatcacgtagaaatcgtaaattctacggctgttctcgttatccagaatgcgactttgtctcatgggacaagccaattggcagaaattgtccaaatgatggccactttttagtagaaaagcattctaaaaaaggtccagtgattctttgtcctaacggtgattatcgtgaagacagtgaaaacgaaaaaaacaattaacatagaaaatataggtgagtaaatgccaaaaaatgtaacagttattggtgcaggtcttgctggtagtgaagcaacttggcaattagctaagcgtggtattcatgttgacctttatgaaatgcgaccaaaaaaggagactccagctcatgaaactggtgaatttgcggaactggtttgtaccaattcaatgagatcaaatcaattatctaatgctgtaggtcttttaaaagaagaaatgcgtcatttagattcattgatcatgaaagctgccgacaaaactcaagtgcctgcaggtggagcattagccgttgatcgtgatagtttcagtaaatacgtaactgacactttgcgtgggttagagaatgtaactgttcacgaagaagaagttactgaaattccgaaagatgggattacaattattgcaactggtccgttaactagtgatgctttagctggacagattcaaaaattttctggaactgatagtttacatttctttgatgcagcagctccgattgtggccgctgactcgattgatatgaaaattgtttataaaaagtcgcgttatgatcgtggtgaagctgcatatttgaattgtcctatgactaaagagcaatatgaaaagtttagtcaggaattaattaacgctgaaactgcgcaattacatggttttgaaaatagcgatgtttttgaggggtgtatgccaattgaagtaatggcagcgcgtggggctaaaacaatgctttttggtccacttaaaccagtaggattagaagatccacatacaggcaaaactccttatgcagttgtacagttgcgccaagataatgctgcagcttcaatgtataatattgttggtttccaaactcatttgaaatttggtgaacaaaaacgagtattttcaatgatcccaggcttagaaaatgcacgtttcgttcgttatggtaaaatgcatcgtaatacttatatggcttcaccagaagttttgacagcttcttacgaggcaaaagagcagcctggattattttttgcaggccagatgacaggtgttgaaggctatgtagaaagtgcaggtagtggcttagtagcaggaattaatgcagcacgtgaagctatggggaaagatactgtggctttcccaaaagatactgcgttaggctcaatggctaactacataactactacgagtgctaaacatttccaaccaatgaatgctagttttgctttgctacctccactagagggtaagaagattcgcaagaagcgtgagcgccatgagaaggtcagtgaacgtggtcttgctagtttagatgaatttaagacggaagttttagattaatgaaccaaaggcaaagtgagttagatcaatttttatcatatttacaaaatgagcgtcattatagtgcgaaaaccgttttagcttatcaaacagatttgcatgaagcggaaaggttttggcatgaaaatggtggattcccaggttggactaaagtaagagaacgtgatatccaggtttatctacaacatttagcagaacgcaagttagcccgtagtagtcagttgcgcaagatgtccagcctgcattctttttaccgctttttaacccgccgcaaactagtggcaatcgatccaactcagggtattactttacgccgtggtgagaaaaaattaccgcaatttttttaccagcctgaattaaagcaggtttttgattcattgaaaggaaataagcctttgacgatgagaaatttggcaatgtttgaactgttttatgcgacagggatgcgggtaagtgaggttagtaatcttactttgaatcaacttgatttagacttacagacaattttggttcacggtaaaggaaataaagaccgctatgttgcttttgatgataaaacaaaaaaatctttgattgcttatttagaaaatgcacgtccattattacttaaaaatgatgatgaacagcatgtatttttaaataatcaaggaactggcattactagccgcggaattgaaactgtaatgcaaaaaacttttaatcaggcaggaattagtggtaaagtacacccacatgagttgcgacatagctttgctaccgcgatgcttaataatggagcagatttgcgaagtgtccaagagttattaggacacagtagtctatcagcaacgcaaatctatactcatgtaacaatggctcatttaaaatcagattatcaaaaatattttcctcgtaataaagaaagttgaggtttaacatgacaacaatttgttcagtaagatttaatggaaaaacagcaattgccggtgatggacaagtaaccttaggcgaaaaagttattgccaaggcaacagcgcgtaagattcgtcgtatttaccatgatcgtgtagtaattggttttgccggtggtgtagctgatgcagtcagccttcaagatatgcttgagggcaagctcgaaagctactcaggcgatcttcgtcgtgctgccgtggaaatggctcaagcatggcgtaaggatccaactctacaaaaattaaatgcaatgttgattgcttttgatgacaaagacctacttttaatttcaggtaatggtgaagtacttgaacctgatgaaaacgtagttgcaattggttcaggtggtaattttgctcaagccgcagcgattgccatgactcgacacgcaaaagatatgaaggccgatgaaattgcacatgaagctgtaaagattgcttcaggaattgatgttttcactgatgataaaattgtcactgatgaaatttaggagtgaaggaaatggctattaagaccccaaaagaaatagttaaaattttaaacgaatatattattggccaagatgaagctaaaaaatcagttgcgatagctctttacaaccgttaccgtagaatgcagttatctaaagaaatgcaacgtgaagtaacgcctaagaatttattaatggctggtcctactggtgtaggtaaaactgaaattgctcgtcgtttagctgatattgtagaagctccctttgttaaagtagaggcaacgaagtttactgaagtaggttatgtaggacgtgacgttgaatcaatggttcgtgacttggtttccgaagccgtacgaatggaagaaaaggaccaatttgctcgtgtaaagactcaagcaactaaagaagcaaataaagaattagttcgtttgttagctccagcagagaaacatgaacgtcgtgaaaatcaaatgcagcaaatgcaagatatgatgtctatgttgatgggagaaaataatcgcgaagaagatcatgaagaggatgtttctgctgatgtaagaaacaaacgaatggatgtggctgaaaagctagctaaaggcttacttgaagatcacgaagttaccatagaggtagaacaagctcctaaggccaacccaatgagtgacatgatgggtcaaatggggatggatatgggctcaatgcttagtgatcttatgcctaagaaaaaggttaagcgtactttatcagtaaaagaagcacgtgaagttttgattcaagaagaatcacgtaagttagttgactatgacgctatctatcaacatgctattgaaagaagccagaataacggaattatctttattgatgaaattgataaaattattgctggtaataaacgtaattctggtgaagtttctcgtgaaggtgttcaaagagatattttaccaatcgttgaaggctcaactgtaaatacaaaatatggcccagtttcaactgatcatattttgtttattgctgcaggtgcctttgctgaaagtaagcctagtgatttgattccagaacttcaaggacgttttccaattcgggttgaacttaacgctttaaccaaggacgattttgtcaagatcttgaaggatccacaaaattcattgcttaagcaatacattgctttaatgaaggcagatggcattaagttagttttcacccaagaagccgttgataaaattgcggagattgcctttgatgttaaccaaggcactgataatattggtgctcgtcgactttcaactattcttgaaaagctcttagaagacgttctttacgaagggcctgatatggaaatgggtgaaatcacagttactgaagcctatgttgaagataagttaggcgatattattatgaataaagacttaactaaatttattctctaattgatcaaagaatcacgaatgaagcattcaattcaaagtttgaatgcttttttcttttgtttttattctggcttattgacgcattaatgttaaaatataagtaattaagcgattacattatgatttttaactgtttgatatgtagagggaaatttagttatggattacacaatcaagaataatatgatcgaagtagtgatttcggatcacggagctgaagttcagagcgttaaaggagctcataccggtgaagaatatatgtggcaagctgatccagagatctggggcagacatgcacctgtactttttccaattgtagggcgacttaagaatgatgaatataagtatcaaggtaagacctatcatatgggtcagcatggttttgcccgtgattgtgattttgaagtggagaatcatacacaagaaagtatcacgttcttactgaaagataatgaaaaaacgcgtgaaatgtatccatttaaatttgaattcagagttaactataatttgatgaataatttattggaagaaaactttagcgtagttaataaatcagatgaaactatgatttttggtgtaggtggtcaccctggatttaacttaccagtaaataatggggaagagaaagaagattattatttcgatatgcatccatctattgctagggtaaaaatcccacttaaaggagcatatcttgactggaataatcgttctctagcttcgactgatagttttattggtttaagtgatgagctatttaaagatgatgccttgatttatgaattacatggtcatgacaataaagtatctttgagaactgataagagtaagttccacatcaatgtttggactagaaatgcaccatatgttggcatttggtcacaatatccaaataccgctaattatgtatgcattgagccatggtggggaattgcagatagagaagatgctgatggtgagctagagcacaaatatggtatgaatcatttggagccaggtaaggaatatcaagctggatttagtattacttatcactctgcatctgatcctgaataaaatattgaggaataaaaatgaaatatttaacttttaataacggtgtaaaaactccaatcttcggctttggaacatatagaattcagcctagaattactgaaggagcggttgtcgaggctttgaaggctggatatcggttaattgatactgctcaagcatacagtaatgaagcagaagtaggcaatgctattaacaaaagcggcattaaacgtgaagacatttttttgaccactaaagcgcaaacaagtggttatagagagacgaagaatgggattgatgaatcgttaattcacgcccagcaagactattttgatttaatgattattcactggcctatgtctgatagtttaggtacttaccaggcacttgaggaggcatatcaggcgggaaagctacgttcaattggactgagtaacttcaaccatgatcaagtaaatgaaattatgaataatttcgatactaagccagtagttgatcaaattgaaacgtctgtctttaagcaacaaaagaaaatgcataaatatttaattgaaaataatattgtacatgaatcttggtcaccactcggtgaaggaatgaaggctttatttaatgacccaaccttactttctttggctgagaagtataataagacagtgccacaaattgcgttacacttcttggtacaagaaaatatcatgactattcctggctcgacgaatccgttacacatgaaggataatttggatatttttgattttgaatttactgctgaagagatggagacattgcgtggccttgatcaaaaacgtggtattggtggctggcctgcaagtatggatcaagaattagattattaattaaataagcatccctaaaacgatcttttatggcgtagggatgcttattttgtcgtcaaattttgttcatatattgcatgatttttacaaatattgcagagaaatctagatttattaaaaatatttccaactgttacgaaaaaacatttttctttaatcattgtgtgatctgactgtgatggaactgcaactcgaagcaggtattatataaaatgtcaattgcaagagaataataaaacaaaaatgatgaatagtaattgacgttttaatttaaggagagatgttttttgaaaactaaatctattttaactaagactattgctgttgctgctttatcacttgcaggtattggtgcaatcaatcaactagataataatgaagcacaagctgccgttgtgcaaaatgatgcagcagtgtatacaactacacaagctactaccgtttacaataactatgaaaatccagttgcaactggtcaaactctagctgcaggtactaactggaagattataaaaactgcttatgattcaaagggacagaagtggtatgatcttggcttaaatcaatgggtattggcaactaattatactactagccaaaatactcaagctagacaagaaaatacctacactcaaacacaaacgccagctcaacaaactacacaagctagccaaagtcaaagttcatacacttattcaaatgtgaactacacacctaagacgacaacaactagttcatattcatcaaccgcgacaggttccgaagctagtgcaaaggcatggattgcaagcaaagaatctggtggctcatacagtgctagaaatggccaatatgtaggtaagtatcaactttcttcatcttatttgaatggtgattattcagctgctaaccaagaacgtgtagcggataattatgtcaaatctagatatggctcttggagcgctgctaaaagtttctggcaagcaaatggctggtactaatagataactccaagttctgactaagatagatttgttgaaatttcaccttcaacaaacaaagacgactactcgaaatgggtagtcgtttttgcttgtttatttttttaattcaaatttactggtttctacatagagtgtcatatttttacgatagtaatttaaagttttcattgaaagatgtaatttttcaatataatccgcttctcttaattttgaattagacaaaacagagtagacataagacatccgaagcttatgtgtagttaatggcatgccgactattgaacggtcaggggcaattttttggttaatattaaaatcagaagcgtaatgtttgccatcgcggcgagcaaacagatagggattatcgttattggcaaaattagtgtgattttggatatattctctgacatcattttctttaacttttaccaacaattcatttacatgcaaaatcataatttcttttggcttaaaaccacaagcaatagcagccatcatcttgatagtttcaggatgaatattttttatttgaattaattctgataaatgattttcccagccaataacatagtgttgcttacgattgaagcgattaccacgtaaagtgagcaatggataagtaatgatgtagccatattcattcaaaaaaacaaaatacatctttatgtgactaagatatttatttactgtattacttttcatatggagtttattttcaagtgaatctaaaaaggagactgtaaaatagtttgtgtaaggatgaatgattccttaaatttatttctttaaacattagaaaaaggagttcctttctcgtatgattggtttgaacaaaaaaacacatacagaaagaagaactccttcatgaatgattttaccaaagattttgctcaagctctattcaatccagacaaaataaatgatttattgcgcaaagagctacaacaggctgttaataacttgttagaagctgaattgaccgcctttctgggctatgatccctatgccagaaatggctggaatactggcaactctagaaatggtgcttatttccgcaaagttgatacgcaatttggcccaattgaagtgcaagtgcctcgggatcgcaacggtcaatttcatcagcacacgctgcctggctacaagcagcactcggatatcttggaaagcatgattatcaagctttactccaagggcgtgaccaccagggaaatagccgatctaattgaaaagatgtatggcagccattacagtccagctcaggtatcaaatatttccaagcagatgattccaaaggttgaggcttaccacaaacgcaagctaagcgacaagtttttctgcgtctatttggatgcgacataccttcctttgcgccgagaaacatttgagcgtgaagcagtctatattgccattggcatcaagcctaatgggcacaaggaggtcattgactactgcattgcgcctagcgagaacattgaagtctggacagagatgcttcaaaacatgaaatcccgaggcttaaagcaagttgagctttttctttctgatggtgttgttggcatgaaaacagccttggccaggacttatcctaaagctcattttcaacgctgtttggttcatgtcatgcgcaatatctgcgctaaagtacgcgtcgacgatcgtgaaaagatcatgaacgaattcaaacaggtgcatcaacagacaaacaaagaagaagccacagctgtcctgcatgacttctataccaaatggggcaaggtttacagccatgttatcagaagcttgaaagacatagaaccagatctgctggtcttttataactatcccaagcagatcagagcttcaatttattcgactaacatgattgaatatttaacaatgtgatcaagcgcaaagctaagcctaaggcagagtttccaactgaacagtcgcttgatgcttttattggcattcaggcaatgagctacaatgaccgttatttcaatcgaattcataaaggctttggtcaggctttggtcaggttcaggacaccttagaatcctactttgattaaataaataattaaaaaatcaatttacgagaaagatctatttacacaaaagatttgacagtttcccaaaaagttacgtatatctccagttgtaacattttctacatttgcttcagtagcatctaaactaccagaataataatcccaaaaagttgaaattgaagaacaggctagagaaatagttgaatcggctagtttcttttgttgtttacagtaaatgcgaaatttatcttcatatggaaaagtcaagattgaggctcctttcaaacattcgttaaaaataattatacattatttcaagcacgttgttactaaattttttattaaataatcaaactgcgtgtcgcaaagcgacacgcacacactaagtgtataattttttacggtaagttgaataaataattaaaaaagcccaagtcctttgaatttggacttgagctcaaacaaaaagaccagtagtctgatgttaagaacaaaaaacacattagaagctggtcttttatgaattcaattgtaactgaaatcgcaaatattataaagtctgaagataattatattaagcgtgaaagaaaaataatctacgcgtggtgctagttaaatcgttctagacaataagccaaattataagctaaaattgcaatttccaaccggctttgaaagcctatcagactacgtgctcgattgttctcggcattgtaataggtcagaagcgaaaagtcgctttcaattgttctgcgaatagccatcaattgatgatcattgtgctttttagctcctgtcatatttttacgatatggtgtccaaagttcgtaacccatttgttttagctgttgatgcagttctttgcctaaatagccttcgtcgccaagaagatagtaattagatggatgggtattttctatcagttcaactgtctccctggcatcatgaactgatgcctttgttacgacataatcaagaatgtaaccgtcatcgctaacaatggcatgaactttgaaaccatagaagtaaattttcttggtggccttataaccaatgttggcataaccgcgaaaaattttagcacgatagtttcgaattggttggcaaacaggtaccggaaagctgtcaatgatcaagaactgtccattcaggtcaacctttttattcatttcttgccgtatctgataaatcaattgcaatagctgacgtgaacgccgattaaaacgtgagtgtgataaacaattgaaacattcacagaatcttctttgtgattcaattcctgtcttagcttgccagataagtaaagccaaaatcagactgtccgtagttttaatttgatcaatatttcgccgatgagtaaactcagccggtgcatacaaacgataccagtgccgacaaattatcactaaatctttaaaactaacttgtaaatggtggctaaaacgcttaagcttaaggcagttcaatcagatcagactcttttctattattactatttacaagtcgagtctaacaagattggacttttttattaactaaaacgatttaactagcaccacgcgtataatctgtttcttcttaaacctgattaaggaaatcatggccttggctttagctaaagttgatgatgaaatgattaccaaggttaaagcacagggctatcagattgataagaagaatgagcgctcaatcaatatggcttttggcgaagttaggtatgtcagaagaagatatgtctgcccaggcaaacaagcaaggtatcccttggatgaattaatgggctttgacaaatacaagcgctacagtattttagcagtcaaaaacatcttagaagtaagcagcgttgccacttatcgcaatactgctctagcagtcaattgcctgtctggctttaatattagccatatgcaggtgggcaatttggtaaaaatggccgggaaaaatattaaagcgggccaagaagcagattcaagatatgatgccgcaggcactaagaaaaaggtcccagttttgtatcttgaaggcgatggcgtggtgatcaaaggcactaaaagccggttggaatttcatcgctatcaggtctgtgaaggcattgtcaatataagcaagaaacgcagaaagcgaatcaatgccaaggaatttgtttctttaagccgacttgatgcgctgaacgaagccaaggagtacctggccaatacttatgatctttctgatactgtaattcttagcaacgccgatggcggtgctggatatgccaaaacagacttcgatgacattgtagggctatgcaagcgtcatgagcatttcttggatgtctttcacctaaataagaaaatcaaagaaaggctatattttgcgcctgacctgcaaggcaagctgatttctgctttggaatacaaatacagctatgacaaagttaaaactatcctaaccactgcagaaagccgactaattgatgaattgaataccgagctcaatcatgattatctggggcgcctaaggaattatattgatcgtcattgggacgatattaagccgtttaagaaacgaaaactgactgtgactaaagccattggctgctgcgagagcaaccaccgcaagtatacctaccgtgttaaggggcaaggcaagaaatggtcaaaatctggagcagaaggcatgcttaggatcttaagctgcatcaagaatcgagagctggaattttggcttagcagcgagtttgaagattcagaaataactgtattgactgaacaggaattaaaagcagcggcccgtgacagcttaaagaagcgtcatgaagttcatttaggcatccagcatggcgcattaaccgcacaggtagctggcaatagttatttaagcaagctaagcagaaatttaagtcatataaatatttaagaaattaaggttagactaatggtttaaaggctaccgcaaaaacattgacacttacacgcacacaatacaacttgccaaccaaacagaaaagtcgtatgatgataactgttaactgaataggcgatgacgttcgccattaaccgagtaaaatctaatgacgtctactttatccgataggggtagagtagacgtttttttgtgggaggaatctgtttgaattcaaaatttattaattacattagtatcgctattttcgccttttttggtggtatggcacgtgctggtttaaatgcaaacttcagctattatggtactttttggggtaatgtcataggttgctttttattagcgtttttcacctacttttttattgaaactaaagagattaggcagtggcttgtagttggattaggtactggctttgtaggtgcatttactactttttcaacttttaatcttgatgttttaaaaaatatgcaggctaatttgccaatcgaagcagtaatttattactttagctcaattatttttggctttgtttttgctatgttaggaatgaaaattggtaaaaaagttggtcaattagtaagaaaggaaaggaatacacgatgaattttttgcttgcaggaattggtgcatcaattggagctatgcttcgttatgctattactaattatggtaaaaagcattgggaatggattggcaataaattttctaatttacctacaccgactttgcttattaacttaactggagcactaattttaggcttgatttttggaattggtgctaacacttttatttatgcattactgggaactggagtaatgggtggctatacaaccttttccactatgaatacagaattggttgagctttataagagtaaaaattatcgtggtcttgtattctacgcggtgtcatcatatctgggtggcttggttctagtttattgcggctattatttaggaaatttactgaaataatattgacagcatgaaaaaaatgggtttgcttgaacagattaaaaataagggattagtcctagatggtgcaatgtcgtatgaattggaaaaacaaggcgtagataataataataaattatggaccgcaacagctttgattgatcagttgagcaaagtttatcaagcacattgggattggttaatttttataaaaatggctggttccccaacggctggggtggagtatttacaacaatgctaacagtaaactttgctttttcaggaactgagcttattggcattacggctggtgaagcagagaatcctcagaaagctattcctgaagcaattaggacaacactttggcgtttaattgtcttctttattggctcaattgtagttatggctgcattaattccttatcatacggctggagtaactcaaagcccatttgtgtatgtgcttgacctaattcatgtgccatttgctgcaaatattatgaacttcgtagttttgactgcaattatttctgcggccaattcaggtttgtatgcttcaactagaatgctttggtcgttgggcaacgaaggaacaattcctaaagcattcaccaaaactaataagcgtggtattccagtattgtcattagtagtaagtatgttaggcggaatttttgctttgatttctagtaaagttgctgcctcgacggtttatctagtattagtttctatttctggattagctgttgtattcgtttggacggcgattgcatggtcagaattgaagtttagaagggcatttttaaactcaggtcatcaactcagtgaattgaagtacaagaccccatggtatcctgtaattccatattttgcatttatatcaagcctactttcttgtgtgttaatctggttcgatccaactcaaagagtagcattgtactatacaattccttttgtagctatttgttacttgggacatcatttttggctaaaatctaagaaaaataatgaagaagttttattggaaaaataaaaaagtcactagtgatatatgacactagcaactttctatagcttatatactgcattaaaacaagatcagtatataagcttttttgatacatgtaaaaatttttattcggcgtccttggtcaattcatagatagcttcggcataaatcgcaattgaattaattaggtcatctaccttcatatattcatttgcttggtgcataaccattggagcatcttcaggttgagcgccatatgcaactccatgcttaaataaacgcccataagtcccaccgccgatcacgacttcatgacctttattaccagtctggcgttcataaactttgagcaaggtttgaactaatggatcgtctccaggtacataatgaggttcttcaaatgaagcaaaactttgagttaagatatcaccaaatttttcttcaacttgcttaaccatcttatctggatcagtaccttgaggatagcgaatattatctttcaaaacagcatttccatttttctcgtagtcaaacattgatggagcacttgagagatcacccatcaagtcatcatgatgagcaacgcctaattttttgccgttaaagtcttcatgttcaacatcggctaagaaatgaagccagcttctatcgcgaccagcaaaatcaaattgatctagaaatactgccaaaaatgtagccgcatttctaccaacttgaggtgcagatgcatgggcaccttgaccagttaattcaatcttagcttcatcgccctcaatagtgaattcgccttcaagtttattatctgataaaaacttagtatatttttccttcattgtggctaaatcactaccaacaatagttgcataggccttttgaggagttacgttttcggcaatgccggccttgaatgacttaaggactactgatccctttttattgtcatctttaaaggtcatggtcagggtatagatcccctgttcaccgttgataattggaaattcggcatcaggtgagaatacttgatcaggggttggctcatattttaggtagtaatcaatgccaacccaattagtttcctcattggttcccacaataaaatcaatcttttttttaggttcaaatccagcttctttaagtaaaagcatgccataatatgcagctagggcaggacctttatcatcggcagaacctcgaccaatgattttaccatccttaattaacattttaaaaggatcagttacccagccgtcaccagctggaaccacgtccatgtggccaataatgcctaaacgtttttcaccagtaccatagtcgacacggccagcgtaattgtcaacatttttgatatggaaaccatcacgctgtgcaaacgataagaatttcttcattgccttaactggacctggaccaacaggatactcttcggaagtattattcaaatcctcagatgagtcgattgcgattaattcgtcaagatcacgaagaatgtcgtcctttttggcttgggccaatttcttataatctatattcatattctgcctcttttcttattttttgttagctaaaattttaccagaaaaattaatattaaacaattatacatttaaaatgggaaaataatgagcattaaagttgtttttagttaattgtgtcatgtacactataagaaataatatagataaaaattacagaaagtatatagaaacggaaagattaatatgagacaacatgttcctgaactcgatcgtaatttaagtaacgacgaattcctagatctaatcgttgattgtttccattcagtaatttttggtaccgttgatcaaaatggtgatccacataccaatattatcgatattgactttaatgaagatggtcgtcttatttttgcaacgactaatcagaagtcattttatcgccatattaagggacacaataaagtttcaattaccgctttgcgcggaagagaaactctcactagcattggtttcactctagaaggctatgttgatgaggtaagtccacaatatttagaacgaatttataaaatcaaaccacaaatgcatcatatttatgctaataaaactaaagatatgaacactttacgagcttttgcattaacaccaattattggttctgtttatgatttacggtttgatcatgtttttcaaaaacaattcgactttgttaatgttcctagtaagatgcaggttgaaatcttagaataataaaataaacatgcctcgattttcgaactgatcgaagcatgtttattttatatattcatttctttacgttcttcgcgttttcttaagtatggtagtaagaagcctaagccaaagagtacgataactgtaataatattcataattaattggtgattaaaggctgcactaccgaatgttgcttctgcttcttgaggaataaatcctaaagtagcacagataaaggtaaagattaagcaccaccagcccattataagggcaccagtcttatttttaatgaagacataatctgagtggaacttctcttggtgcatccgtaacataatgaaagcgaagaatacccaacaagtcttgtatggggaaataataccattgatatttaaaagccaattgtaaattgaattaatatttggcaaagtcccagtaagtaaaagcaagaataaggctaaaccacaagttaaagtgtacgagtgaactggacgacctgttttgtcttttttcccagttaaccattttggcatgaatttgtcggcaacgtcaccggcaaagacacgacttgatgcatcaagtaaaactgctaattgggccatcataaagagggcttgaacaacagcaaagatgtacattaatactttgccccaaccaaggctttcgcctagtagttgaaatgcatagtaaggtccgttcatcttgaaatcatgtggaatatgatgagcattgaaaaacattgctaaagccaaagtaccgaagatagtcaagaatccagtcatcaaagctaacatccacattgctttaggaaattcgtgttttggatcgcgcatttgtacgatataaggagcagcaagttctgcaccagacatggcgaagattagaagaccagtggtagaaaagtaacgtaaactaaatgatggcttaaatgcggccaagttaaatggttgggtagcaatatggtgtccatgcataactgaccaaacagcaagtaaaacaaagagcatagacataataaacattgcaccaccaccaattaaagatagtagttcaagtgaattcttgattgcattttcaaccaaaataaaggcaagaataatgacaaaggtcaaaatcccaaaccaaaaagtagacatatgcttgtctaaagtattgttgcccaaaataatccatgaaaaggacacaataactgaattagaaacatcgaccaaataaggaacagtttgaacccaatacatccatgaagtccagtagcccagtgtatcgttagatgaatgacgtacccaagatgccaatccaccggcttgatcagtaaaggttaggcccatttgactagacatcaatgcataaggaataacgtaggcgaagagtaggaaaatccaagatacaactactgataagccttgattttgaaatggataaaaaatattttcaaaactgataatcgttacgaagtcgatcaatgcaataaccggccatgacatgtagtgttttttttcgggttcgaaattgactgtttcgattgtttctgacataaaaattcctccaagttaagctattttattgttgtgttgacatagctgttctcggaggcgagcaaggcaaatgcacttgttaaaaacctccaatatttatataataatttcagctgtagcgtattttaagaaagaatgcaaaaaatacgctatactgtagaaaaattataaagactttttaaagttttgcaatatgtaaaacggtttcgtggacaaaatggaaagaaaaaggatggattttttgaaaattgccattggaaatggcgtcaatgttaataagatgaaaggttggtcgtcaattccaattggcgatgtacaaaatagtgctgaacttgccgcaattgttgtcaaaaatgatgatgcattaggaataaaacaagcagaagctctaagagaacaatctggttttccgattccattgattaaagtaactgatcaggtagatgaagaccaagtcactccgaaagctacagaatatgaaaagcaaatggtgccaggctttttgaccgacttgatcaattttgctcaagcaaaaccaatttcatttactacaccgggtcaccataatgggcaatattatgataaacatcctgccggagtagtttttaataagttctttggtaaaaatctaatgtttgccgatacaagtgatactgttcctcaattaggggatacaatgacgcatgctggaacgccacttaatgcagaaaagaaagctgctaaaacttatcatgcagataaggtttacttctgtaccaacggaacgacttcagctaattctatttgcgcaagtgcacttttatctgaaggcgatctagttttatttgatcgaaataatcataaatctttgtataattctgccttggtaatgagcggagcaaagccggtctacattccaactgatcgaaatgcacttggactaattggagaaatggatccagccttcttaactgaagataaaattagagctgaagtagctaagatagatccggcaaaggcaaaggctaagcgtccatttaggttagcaatcgtacaagcagaaacctatgatggagtcttttatgatgcacaatggattattgaccgaatcggtaaactttgtgattatgttctgtttgactgtgcctggggcggctttgaagaattcgtaccaattatgagacatttatcaccacttctacttaacttgggtcctgatgatccaggtattttggttactcagtcattacataaacagcaagcaggtatggctcaagcgtcacagattctaaaaaaggatgctcatattaaaggacaaaaacgatatgttgatcataagcactttaatcatgcttatctgaagtttgttacttccagttatgcatacccactttatgcttcattaacagttaattcctacgttactgctggagcaggaaataaaaagtggtgggatcaaactctgcgaatgggaattgaatggcggaaaaaactactcaaaaagtctaagctatttaagccattagttcctgacaattttgccgaaatttcgactgatgaattggctaccaatgcagaatattgggaaatgggacaaaatacggattggcacggtttccgtaaaatggttccaggcgaagcaatgattgacccattgaagattacggtaaaaactcccggaattgatgttaaaaatgcaaaatatgagaaagtaggtattccaggcgcggtagtggcagaatacttaatggaaaatcatattattcgagctaaaaatgatttgaattcattgttgtttttacttacaccgggagatagtcaagcagaactagatactttacttgaagcttttttaagttttgaaaaacactatctagaagatgacttaatgaaagatgttttgccggttttatataatgagtatccaaagcgttatcaaggctataccctgaaacagttgtgtcaagaaatgcatgagtactatcaggaaaataatacttttgtattacagcaaaagctattttctaaatcagggatgcaagactatcaaatgacaccagctacagctgatcagctttttaaaaaagatcaaaatgaactggtcaacctagaaaatgttgttggaagaattgctgccgaaggagctttgccatatcctccaggtgttttcattgttgcacccggtgaaaagtggggaacggtagatcaaaagtactttgaagtcttggcgcatgctattgaaaagtttcctggttttgtgccagagattcagggagtatatctgagcgaaaataataatggtagtttatgcgtacaagcagaagtaatcaaaaataaatagggagttaaaaatgagtttttcttggaaagagaatttaccaaaagagttaagcgataaagtgactaaagttgaatcaatgattcaacctcgtttagaaaaaattgatgaacaggttttgtataatcaacaacgtgtattggacctatttagaaaacatcatgttggtgaagaagatctagttccatcaacaggctatggttatgacgatataggtcgtgataaaattgaggatatttatgccgattattttaaaacagatgatgctctagttcgtccacaatttggctcaggtactcatgcaattacagttggtcttttcagcatgcttcgcccaggggataccctttattatttaactggaacaccatatgatactattcaagaagttattggcttagctggcaataaaccaggcaacatgaaggaatggggcatcaagtttaagactacagaattaaaagacggcgaggttgattatgatcaagctaaaaaagatatcatggatccttcaattaaagtagtggcaattcaaagatcattaggctatgcaactcgtaagacttttaccatggctaagatcaagccaatgctcaagtttattaaggaagttcgtcccgatgtcaatattttcattgataactgttatggtgaattttctgaatgtgaagaaccaactttctatggtgcagatttaatggctggttctctttataaaaatgctggtgcgggtttagtaaaaggcggtgcttttttagttggccggcaggatttaattgatggtgctggttcacggttgacagtgccaggagctggaaaaggtgaaggcgcaacttggggttatttgcgtgatatctaccaaggattctttatggcagctcatactactggtgaagctcaaaaaggtatggtctttactgcagccttattagaagaaatggggatgcaggtttcacctaaatggagtgatccacgtagtgatattgttcaaactgtcacttttggtaaacctgatccgatggtaaaattttgtgcggctattcaacactattcaccaatgaattcatttgttgacccaattccatatcatcaggatggttacgaagatgaagttgttatggcttcgggaagtttcgttgaaggatcaacaattgagctttcttctgatggccctttacgtgaaccatacatgctttatattcagggcggtttgtcctatgctcatgataagattgcgattactcatgcagtagaagaaaccttttataagtaaatttaactctaaaagattcacatttttctttatttaaaagtgtgaatctttttatcttgtttggggtgaattgttaatttagaataaaaagtagcaatttaactagttaggataagtttatgaatccagaagaagttttaaaagatacatttggctatacaaattttcgcccaggtcaaaaacaagtaattgatttagttttaaaaaagcaaaatgtgttagcggttatgccaaccggtggcggaaaatcaatgtgttatcaaataccagctttgattaatcccggtgtaactttggttatttcaccattaatttctctaatgaaagatcaaattgataatttaaagcaaaatggaattaatgcggcagcattaaattctactacaccgcaagaagaggttaatccaattttacgtcaggcatatgaaggcaaaattaagttaatttatattacacctgagcgtttagcgattgattattttagatatcagttaaattttttagatattgatctagttgctgtcgatgaagcacactgtatttcacaatggggacatgattttcgacctgcttatcgtcaattattagatggaatcaattcactaaaaagcagaccaaatatattagctttaacagcgacagccacgcctgcggttcaagatgatatttgtgaacaattgaatattcccaaggagaatatgattgttacctcttttgctcgccctaatatatcgtttaaagtggtcaactcaccacaaaatactccattatatatttcagaatatattaaggcacatcaggataaagcggggattatttacactaatacacgtaaaaaagttgaaagtttgacagattatttggctaagaaaggaatctctgttggtgcttatcatggtggaatggattcttcagaacgaagtcaagtacaagaagcttttcaatttgatgaatttcaagtaattgtagcaactaatgcttttggaatggggatcgataaaagtaatgtcagatttgtgattcatgcctcaagtgcccgtaatatggaaagttactatcaagaagcaggtcgggcaggtcgtgatggggaagaaagcgaagcgattttaatctatcatcctggtgacttgcgtcaatatcgctactttattgatgaatcagatgcggatgataaatatcgagaactgcaatatcgtaagttgcaaacaattactgattatgctaatactggtgaatgtttgcagcaatttatcgtccgttattttggtcaagattgtccgccatgtggtaaatgctcaaattgtctaaatcaggataaattgactgacattaccattgatgctcaaaaagtgattagtatggtttatgaactagatggtcgctttggaaaaacgatagttgctcaatgtttgattggctcaaaaaatcagcgcatgcaagaaatgaatgctacacaatataagtcttttggctctctaagaatgaagcaaaaagatgctataagcttgattgactatttaattgcttcaggttatctagaagttgaaggtagcaaatatccactagtgcatgtaactaatcatgggtgggatgtactagatggcaaaactgtagtcaaacggcgaattgctaagatttcagtaactactactcatgctggtgaagaaagtgatactttatttgaagctttaagacaaaagcgtttggaattagctaagcagcaaaaagtaccagcatttatgattttttcagatcgctctttgcacgatatggcacaaattaaaccacaaaatgaaagtgaatttttagaggtaagtggtgtagggcaagcgaagatgaaaaagtatggtcaggctatgatggaaataatcaaaagaaaaggaaaatagctaaaataataatattaaaatattggtcaaaccggtctttttttattacaataaatgtaaatgaaagaaggactaaatttatggctaaaaaaacattaattatctattattcttgggaaggcaataccaagaacatggctaaaaagattaacggagaaattgaaaacagcgaattaaaggaagtaactgttgctcctgacgcttttgattcagatatgtacaagaccaacgatattgctctagatcaaattcaaggtaaggttccttatcctgaaattcaaatggatgatatcgattttaataattatgatttgattttagtcggtagccctgtttggtcaggctatcctgcaactccaattaagccattacttgaaaagatgaaaaactaccgtggtgaagttgcatcattctttacctcagcaggcactaaccataaggcttatgtcagtcactttaaagaatgggctaatggtctgaatgttgttggtgttgcacgtgatgatagtgaagtccgcgattgggttaaataattaacctttagaatattaaaaatcagtacaaactccgtgttttgtactgattttcttttgtattttaagaacaaaaataagagttacaaaatgtaaccctcatttttatttaggacacgaatcaagcgccgttacgcatgactcctagcttgatgggtgtctctaaatatgtggtatttttatatctatcaaaagaaaaaacagcggtttctttaataaatatcacaacaacacctcatttctatgtcttttaaaagtaagcgcttactttatctaattataatatatcatataacacatatttttaatagtaattttgtcataattttccaaaaattggaacctgtcaaatcttttgtgtaaatagttctttctcgtaaattgattttttaattatttatttaatcaaagtaggattctaaggtgtcctgaacctgaccaaagcctttatgatttcgattgaaataacggtcattgtagctcattgcctgaatgccaataaaagcatcaagcgactgttcagttggaaactctgccttaggcttagctttgcgcttgatcacattgttaaatgattcaatcatgttagtcgaataaattgaagctctgatctgcttgggatagttataaaagaccagcagatctggttctatgtctttcaagcttctgataacatggctgtaaaccttgccccatttggtatagaagtcatgcaggacagctgtggcttcttctttgtttgtctgttgatgcacctgtttgaattcgttcatgatcttttcacgatcgtcgacgcgtactttagcgcagatattgcgcatgacatgaaccaaacagcgttgaaaatgagctttaggataagtcctggccaaggctgttttcatgccaacaacaccatcagaaagaaaaagctcaacttgctttaagcctcgggatttcatgttttgaagcatctctgtccagacttcaatgttctcgctaggcgcaatgcagtagtcaatgacctccttgtgcccattaggcttgatgccaatggcaatatagactgcttcacgctcaaatgtttctcggcgcaaaggaaggtatgtcgcatccaaatagacgcagaaaaacttgtcgcttagcttgcgtttgtggtaagcctcaacctttggaatcatctgcttggaaatatttgatacctgagctggactgtaatggctgccatacatcttttcaattagatcggctatttccctggtggtcacgcccttggagtaaagcttgataatcatgctttccaagatatccgagtgctgcttgtagccaggcagcgtgtgctgatgaaattgaccgttgcgatcccgaggcacttgcacttcaattgggccaaattgcgtatcaactttgcggaaataagcaccatttctagagttgccagtattccagccatttctggcatagggatcatagcccagaaaggcggtcaattcagcttctaacaagttattaacagcctgttgtagctctttgcgcaataaatcatttattttgtctggattgaatagagcttgagcaaaatctttggtaaaatcattcatgaaggagttcttctttctgtatgtgtttttttgttcaaaccaatcatacgagaaaggaactcctttttctaatgtttaaagaaataaatttaaggaatcattcatccttacacaaactattttacagtctcaaaaattggtttgcttgttggtaattcatgattataaattaaaatagataatgactaaatatggaaagggatatttaatgactattccaacgaaaattgaagttcgtggcggacgagtacataacttaaagaatattgacgttgacattcctttgaataaatttgtagcaatttcaggactgtcgggctcaggaaaatcatcactagcaatggggattctttatgaagaaggttcaagacgctatcttgatgctctgtcaacttatatgcgtaggcgaattaaacagggaaatcaggttgatgtaactagcgtcaaacatattccctccgcattagctttacggcagcgtccaagtgtaccaaatgagcgagctacagtaggaaccatgagtgagacttttaatgttttacgcttaattttctctcgtttgggttctccagtttgtcctaatggacaccgcttgaagccgagtttggcaattgcaaaggcaatgagtatgtcaggtgagcaaatgggacaattaacttgtccagtctgtggtgtaaaattttatgcaccaagtgccgaacaatttgcttttaattcagatggtgcatgtactgagtgtggcggaactggtaaggtacggcaactagatgaatctaaactgattacggatgaaaatttgtcaattaaagatggtgcagttgcatcttggagcttgccaggacggaactttatgcctaacgttgcagaacatgctggtgttaggatcgacattccttataaagatcttactgataaagaaaaagattttgtcttaaatggtcctgaaaagaaatataaaatggactttttatcaggaactggcagggtatttcatgattttaatgccttatatgaaaatgctcggcaagctgtctatcgttcagcaaagagtagcaaatcagaacgtgcgcaaaaaagaatagccgaattctttacttattcgacttgtccactttgtcatggtagtcgtttgaaaccagaattgttacaacagctgatcggtaagcaaaatattaatcaggtggccgaaatgcagttaggtgatttagttacctgggttaaagatgtgcaagcaactttaccaactaatatgcataaaatggctcattcgattattcaggagtttttggataatttgcaaccattattagacttagggctagactatttgactatggctagaagtggaaataccttatcgacaggtgaattgcaacgaattcaattagcaagaacattacgtactgaaactactggagttttatatgtcttggatgagccttctattggtctccatcctgctaatgttgcaggattaattaaggttttacgaaaattagttgctcagggcaattcattagtagttgttgatcataatgttgacattattaaagccgctgatgaagtaattgagattggaccaggttcaggtaaaaaaggtggtcagattttggatcaagattcaattactgcgatcaaacatgatcagcattctttaattcgaccatatttggatggcagtgctaagctacttgccagagagccagccaatcaaataaattccgattctatttcatttgaagtaaagcaatattttaatttacatgatgtaaaaactaaaatcccactaaaccaattaactgcagtaactggtttttcaggtgccggtaaaactagtttgattttggatagtttagtgcccgctattatagcaaaaagcaaaagtgaaaaattgccaaaacaaattagtagcttttctagcccaatttcaaatgtagtaagtgttgatgcatctccaattggtaaaagtactcggtcaactgtagcaacttatacttcaattatggacaatttacgaaagttatatgctagtcagccactcgttaaaaagaagcattatacgccaagttggttttcatataataataaacaaggagcttgtcctacttgtggtggtacaggaattgtgactcttgacatccaatttttaccagatatgcaacaagtctgtccaacctgtcatggcgatcgttataatcaagatgtacaaaaggtgaagtggcatgatctgtcaattgttgatgtcctaaatctagatgttaatgaagctctaccgatttttgttaaagtgcctaagattgaacgagagctaaaattgttaaaagaagtaggcttggattacttacatttgggagaagatacaccaactttgtcaggtggagaagctcagcgccttaaacttgttactcatcttagtcataaacaaaatgatacattgtttgttttcgatgaacctacgattggcttgcatcctcttgacgtgaaggttctggtccaagtaatgcaaaagttgttagatcagggagctaccattattacaatcactcatgatttaaatttaattgtcaattgtgattacatgattgatttaggcccacgtggtggtaaaaacggtggtcggattgtccaagagggtaagcctttagaattaaagcaaaagcctgaaagtttaacggcacactatttggctaattatttacatgatttcaaaaatctattttaatattatatgaaaatagcattaaataaatttatagcaaactgtagctaaaaaataagacataggaagaaataatatttgaaacagatctaagattaatgtaatattaaatataaattaactatctactcaatttatactaaggtgagaaaaatgaatttgctcaaacagatccgtgatcgaggattaatcttagatggtgcaatgtctacagctcttgagaagttaggcattgatacaaataatgaactttggacagcaattgcattagaacataatcttgctcaaatttatcaagtacatatgaattattttaaggctggagcccagatggcaattactgatacttatcaagcaaatatcccagcttttgaaaaacatggttttacacaagaccaggctactaaattgattactaatgcagttcaaattgccaaaaaagcccgtgatgattttgcaaagacaacgggaattcataattatgtagcggcttcagtaggaccttatggtgcatatttagctcaaggggatgaatttcgcggagattattctctaacaacggaggaatatcttaattttcatttaccacgattgaagattttattggcaaataaacctgattgtctcgcacttgaaactcagcctaaattggatgaagttgtagcaatcttagattggttaaaggaaaatgctccggaatttccagtgtatgtaagttttacattgcatgatacaactaaaattagtgatggcactcctttaaagcgggtagtgcaaaagcttaatgaatatgatcaagtatttgcgattggagccaattgctttaaaccgtttttagcaactgcagtgattgataaaattcatgattttactgataaacaaattgtcatttatcctaacttgggtggcgtttataacgaatttgagcgcaattggattccatttaatgcaaaattcgattttaaaaagttaagtcaagagtggtatgaacatggtgctagaataataggtggctgttgttcgactaccgaaaaagaaattggccaaatttccgccttttttaagacaattaacaatactaaaagcaaatcagttaaatcagagctaaaaaaggttaaaaatgatagcaatatacaaatttgatttttaataattcatatactttttttgaaatttatcaagtaaaaatctttatctttttatttttatttgatatcatagtagcggagcgtgtgatgagcgctccgaggatgaaaaggctaagcaagatgtttcttatgacatctgctgataggaagaaatttgaaggtgtagaaaagccattaaggacattttccttagtgactttttctttttgctcaaaataaatagccgacttatcgtcgactatttttaatcttaaaaattatttttgtctgtttgtggagtaactttatcccaaattgcatctactaagccaatccacattaagcccatagcaactgagccgcaaacatcacttggccagtgagcgtagagataaactcttgaaatcattactaaaacaagccaaatagctaataaaacagtgagccagattttagcagttttatttttaactaaagctggaatcaatattagtattagccagaaaacaataatcgccattcctaatgtgtggccactaggaaaactgaagccatcatcagcagctaagtgagcagttggtcgtgcccgttggattatatgtttaacaatccaaccaaaagcatcagctgtaactagtgaaatgacaatacttgccgaaagaggacgctgctttttcagccaaagaatgacagctatcaacagcatccaaactaagtcaactttagtatctgctaaaaatgtaattacatgcataatgctctgcagattaggaatactgtggactaagccttcaaagaaattgtcaaagccggtaacccaacttgcatgagccataatagagaatgcaagaatcaaaaagatcagtaatccgatacaaatagaataaatattttttttgcgcattttttcctcgtttatacttatttttataacaataatgagtttatcatagaatatgagtagaaagagaaaaattttaaattaattggaaaataatcatggaaattaaagagataaaatctaataagaagcagtatatagacttacttttgttagctgatgaacaagagagtatgattgatcgctatttagaacgtggaattatgtatatcttgattgataaaggaaaagttagatctgaatgtgttattacggttgaaaatggtaatacagtagaaataaaaaatatagccacttatccagaagatcaaggtaaagggtatgctaaacatttgattaattttattgctaagaagtatcaaaataaatatcaaattttgcaagttggaacgggtgatagccccttaactattcctttttatgaaaaatgtggttttaaacgctcaggtaagatcaaagatttttttgtaaaaaattatgatcatccgatttttgaagctggacatcagctagtagacatgatttatttaagtaagcgattaaattagaaagtaggctttatcgatggaagaaaatactaaaaaaatgttggcaggtaaaccatatcgcccagatactgaagaactgaaaaagattttcggtttagctcatcgcttatcacgtgattacaacatgactactgatgaagatgaggtagaacggaaagcaattatcgatcgtctttttccgaatcatggtcaaaatgtatatttacaaggaccaattgaagtggattatggccaatttacacacttaggagataatttttattctaatttcaatttgactattttggatacttgtcccgtaacaattggaaataatgtaatgtgtggacctaacgtaacatttgcgactccattgcatcctttgttgccaactcaaagaaatgctcgcaagcaatcaggcggaaaaatagccgatattgaatatggagcagctatcactgttggcgataattgttggttagccagcaatgttactgtttgtcccggcgtaaaaattggtaaaaattgcgttattggagctggatcggtagttactaaagatattccagataattcattggcactaggggtaccggctaaagtaatacgtcagattactgatcaagatcatttaaataattatccatattagaaaaagaaaatgtatacgttctcattgattctttatcaaaattgtaaccccaatgaaaaaaataaatgctaatattatgggtagaatttacataacattgctgggggaatttaaaacgaaacgtattaatttaaaaaaaacattaatcaaatcaaccatttggttaactatagctgcttcaatgcctgttggaatggcaattgctaatgccaatagctcgacagttcaggcagcaagttataacaaaactgaaatgcggagctttgttagaaatacattagctagttattatgctcgtggtaccgtagttatagtaaaagatggacaaccacaacaaatttcttatggttacggttattatggcaagcgattaggtgcgggaaacagtaaggtagtttatcctgtttgttctttgcaaaaagtaattaccggcgcaattatcactcaattaatttctgcagggaagtttacacagtatactaagatctctaagtggtatcctaatttaaaaggtgctgataatattaccgtcggcaacttgatgacgcatacttctggattgacagcagctgatactgaagtaaatagaggacgtgtttattcagaagctgatgcaattaattgggttgttaataagctaaactcaactacgcaaaatcaacctggtaatttttcatacaataataccaactatattttgttagctggaattatacgtcaagaaactggacaaagctacaagcaaaatgtgcaggaacgaattattaataagcttggcttaaagcgaacttatttcttggaagatattccagccgggatgacggatggtatctcatatacctggaatcaaaagaattaccaatgggctcaatatgttaaaaagactcaagcttctcaattggtaggtgctggtaatttgttctcagctccaatggactattaccgtattcaacttggtttaaccaatgggcaaattttgagtcgaacagactttgattatatgactcatttaacatcacgttcatcaaatggttattcaggtggtttatatatgaagaataatgataacttgaagttagcatatggtaacttatataatactcactttggtaactggattcagatgactacagataatcaaaatggtttgattatgttcttaaatcaaactcaaaatgatgaaaacagaaataaacaaattggttatcaaattttgaatcatatcaaggctaatacatttagcgcaaaataaaatttttcctgctttaaacttcatgttaagcttaaagcagggtttttttgattggagtaaaaaagatggttaatggtggcgtattagttagccaagatttatcttgtgctggtcaagtatcacttagtgcagctttacccgttttaggagcatgtggcttgagcccgaccgtattgcctactgcaattttgtctacacatacgggtggctttggtgagaatacttttttaagtttgaataatgaaatggctaagattatggcccattggcaaaaggttggttttgatttttcagctgtatacttaggctatttgggcaaaagagcattagatttttggacagaaaagattagctattttaaacaaaaaaataaattgatcttgattgatccagtaatgggtgatcacggtcaactttatcgtggcattgatgaaaactatgtaataaagatgcgaaatctagttaagtcggctacgattttaacgccgaatatgacagaagcagcatttttattaggcaaaaaggcaactagtaattcattgaaaacagcaacagaatttgcggctgaattatctagtcaatttggtgtctcgaatgtcataattaccggtatttcacttaataaggaaaaaattgcggaagttggaattacagccgatcatagttggtctttaattcagaaaaaactcccaggtaattattttggtacgggagatttgtttgcaagtgcattttttgctgctttaatgcataaagaaaatttagaaaaagcgtgttcaattgcggccgattttgttgcacaagcaatcagagaaacacccaagcaagattcacgtctaggaccaaattatgcagcagctttaccagatttactgaagagatggagtaataattaataatgcagatatttagagaaaacaagaattctttacaagctttagttttaacgggactttttgcggcaattatttatattgggatctgggtgttaagaatccccgttcctgctatggtaggacgcccatttattcattttggaaatacgctaactgctgtagcaattttatatttaggttatcgtaatggtatgattgcgggaattattggtctaggtggttttgatttgttaaatggctatgccgcaacatcatggttaactatgcttgaggtagtagtagtggcttcggttttgacagcagtttatcgaggaatgcactatcaagatagtaaaagaaatattattattttaggtattattgcaggggtaactaagatattcactacttattgcgtttcaattgttgaagctttaatggtggggacgagctttaaagtagcgttagttggagcctttgttagtttgcctgcaactgtaatcaattcaatttctactgcaatttgtacaccaattttatattttgctttgcgggatgctagtcgtctaattataaaaaaggttagataaatcaatagattttacacgaaatttgcaaggtgctatattaaagatattattactggcataaaaggtaggatagtatgaacgaagacctaaagaaaaagaataaacgaaacaatattattattttaacgattgcagttttaattatcgttggagtaatcgcgggttttggcattcataatcaccgtgtggcaacacaagctgcagcagaaaaatatgctaaaactcactttaaccctaatgttacaatcgatggagttaaagtaggaaagctaaccgttactaaggcaatggctaaagttaaccaaaaagctaaaaatcaagttgagttaaaaaataacaaactggtttatagctataacactacagtccaatcattagatgagtccgagacaaaggccttttttaagaagcaacaaactaaaactccatcgactcagacttataagtttactactagtaatttagctacagctaaaaagaaactaactgacttaagcaaagcagagattacttataaaattaatggcaaaaactatcaattaaaggccaaagatttattgaataatgtgacttatcgagataatcgctatcaatttggtgatactagtaaattaacgactaagttaaatcaaattgataaagaagtttcaacattacacaagagctataaatttacagtgccaaagggcaataaagttaaaggcaaaacgataacggtaaagaataagacttggggttggggcgtttatgttaaaaagacgcaacgcttacttctcgaagcatttgccaaaggccaaaaaaattttgatggtgcagatgcactttacggtttaggctacagcacttatcctcacggctatggctattcaaataaagaaattggtgatacttatgctgttgtatcattgaaaaagcaagaggtatggttgataaaaaagggtaaactagccgttcatcttcgtgatgttgttaccggtactatggaaggttctaagggtgatcaaactccgcgtggggtgtggtatatccactataaggaatcaccaagtacattgcgcgggaccaatgatgatggttcaagttatgcttctccagttaagtattggatgccatttaccttaagtggctgtggttttcacgatgcctcttggcggactgattggagcaagaccgcttatctaaaaggtggttcacatggttgtgttaatgttaagccaagcgagattcgaagcgtttggaacaatattaaaaagggcgaacctgtaattatttacgaataacatgtttaagggatccattaagttggatccttttttatgaaacaatttttataaggtgaaaagctatttgattacttggaaaaacagctaaatgtaaacaataaacgtgaaacattgctctgaagcccgatattatcgcgattgtggataaaaatataggtaattcacatctattactaactcaattaatatttttttgaaaaaagagtagaaagatgaacctttgtttgatataatttttatgcgaactaatggtctgaaaatagaaagatgagatgataatagctatgatgcaacaagaggaattagaatcacaggaagaaaaagttaagtttttggatgaagactggttgaattggaactaaaatctttaaatgtataattcacttctgtataattaaagaaaaataaaaatttattaactctttcacctaaaggagtaaattatgcaagtaagaactagatgttttcaaagtttagattacgaagatttgtgccgggttcatgatgcggctcgtttgcaagaaatgaaaataggcggagtggagaaatattttattccgtttaaggaagcaccatactggtataatttctttgattctgagattaggattgtagaagttaataatgaatttgctggctttgctgcgtataagccacataatttagcttatttttatattgatcctcaatttcaacgacgtggtattggtgatcaattgctagcttcagtgttaccaaatattagacggccgattaggctagaagtctttagcgcaaatatagcagctaaagcgctgtatgcaaagcatggttttaaaattatcaaaacagttaaagagtcgtggtggtcagaccccaagtctgagccagtttcaagtgatacgatggaattagtgtaagaggcaatattaatgagtttttataatttagattatgaagaaaaacggtttattcagttagctaaaaagaatactcgctcatattatgaacatcatgatcagattccttcctcacctggccaagttgagctggccaaagaaatagtaaaggaaatgaaagagcttgggcttgatgcttactataatgaaaaaacagcttttgcaattggaaagttaagtgcaaacacagcagaaaaggtaacgcctattggcttctttgctcacgtggatactgcagactttaatgcagttaatattaagccacaaattcacgaaaattatgatggtcagaaaattatcctagatgagaaagataatattgttcttgatccaactgagtttccagacttattaaatctaaaaggacaaaccttaattacttctgatggtcatactttgctaggagttgatgataaggctggaatcactggggcattagcaatgcttaaatatttaactgaacatcctgaaattgaacacggtgatgtttttgttgcttttggtccagacgaagaaattggctgtggtggtcaatattttgatccagctgattttcctaatgtagaattcgcttatacattagacaatgggcggccaggagattttgaatacgatacctttaatgcgtcagagattacgatccatattaaagggactgtagttcaccctggtgaagcatatggtctgatggttaacgcaacaactttgatgaatgattttttgtctaatttacctcaggatcaagtgcctgaaaagtcacgtaatcatgatggttatttcttggttctacatgctcaaagcaatgttgatcatgccgatattagcatgattattcgtgattttgatcaaagtgaatataaccgtaaagaacagtttattcgcgatctagttaaaaagatgaacaaaaagtatggcaatagatttactgtaaatattcgtgagcaatatgaaaatatctacaactatattaaggacaagccatatattgtaaatctggctcttgatgcttatcgcaagtctggactaaagccaaatgtacaatcctttagaggtggaactgatggaaactttatttcgcctaaaggaattcctacacctaacttatttaatggtggtggcaattatcatggccgatacgaatatgtgactgttgagcagattgataaattagccgaagtgttgactaatattgtgactgaacatttgcgtcaaactcgcactggtaggaatgaaaagccactagaaaaatattggtagatttaatagccgttttatttaacaaattaatactgtagcattaggatataagtggctagatgaaatatccttcctccttagaagtgataaataccattttcttcattgataatcttgctacatattgcagtgacgctgtatttgcgccgctgcttttttgttattattggtaataaaatacgtaaaaagtacgtaaagttttttcgattagcatttaacaaataacttaaatagaactaccatataggtggctggacgagaatcttctctcgtagaagcaattaataaaccaattttcttcatttataatctaaccaaaaaggacagggatgctcaattgcattgctgtcctttatttttgataatcttcgccgtaaatataacgatgtaattttaggtattgctcatataatctgcgttcattttgattgtcttttggaaaataatattgtttgcctttgagtcccttgggcatataattttgcttggcgatttgatgcggagcttgaaaaggtgactcagctaggccagctcccgtgatttctttagcgtgtttataatgaaagtcacgcaaactattaggcatgggataccgattgggatgatcactatcttgatcaagtctttcccaaatttcctcaaatgctcctgattttggcgaaatacacattaacattgttgcaaacattagtggatatttagctttaggcattcctatcttttcagcttgattagctgcagtaacaatttgagttacttgttgcggattagctaagccaatataagtatatggaatctcacgcagacgccgtacaaccgaagctaaatctccattttttagcaaaatagcaagataataaagtgcagcatctgtgtcagagccagccatagagtcagaatatgcagctaaataatcgtaatgtttagtggctttcttatcatagctaaagaattgctgcttagtaaacgatttaacatttgctaaggtgatctttttaggattaagtgcatgaacagtctctaaaatgtttaaagcaattcgtaggtcgccatcagctgcggctgctatcaaatttaacgaatttttttcaacttggtgatctactaatttaaggaccttagtacatgccttgttcaaaacagctgcaatatcgtcttctgttagaggattgaactcaaagatttgacaacgtgaccgcacagctggcacaatcgacataattggattttcagtggtagagccaacaagtagaacgtgaccattttctaaataaggtaataaaaaatcttgtagatttttggtcatacggtggatttcatcaattaaaagaacgagagtctgatacttataagcattaataatgttgttcaactgtgctttattatcaattgaagcattaaaggaagcaaagggataatcattctctttagcaataatttgagctaagcttgtctttccggtaccaggaggcccccagagaagtaaagaaatattaacatgctgcttgataatatttcttaaagcctttcctggtcccagcaactcactttggcctaccatatccgccagtgtttgcggcctcatttgttcggcaattggtgttttaaaattcatcaaattccttctttcagtaaggtaagtatactattttcaacaatttttttgtaaaaatagcttgcactatcaaaaagtaagttatacaatagaactaatgtacgagaagttaacgagttttttagaaagaggcgtattgtatgattactctttatatgtcaacaagtagtgcatcttcacgtaaggcgagagcatggcttaacaaatatcatctttctttcaaggaaaagaacgtctttaaggaattatctaaagaagatgtccttcatctgttgtctttaactgaaaatggaactgaggatattttatctactcgttcacagtctttccaacaattaaagaataagttgaatgaagacttgtcattgtctaaaatggttgctttaattactcagaatccaggattattaaagagacctattattgcagacgaccatcggatgcaggtgggctataatgaagaagatattcgtcagttcttgcctcgtgatatcagaaaagctgaattaattgaggcacaacggattgctgatgctgcttaaataagacaaaaaacgatgaatttacctttgtgggtgattcatcgttttattttgctctaaatttttatttagctgaacctgggcgttgcttcttggctacttttttacccatagtcatgttgtcattatatccccatacccaaactgcaataaatgaaactataattgaaacagcactggcaattaggaaagtatagaaactatttagttgagtaggatgggccgggttgaaaaagcttgagaagccaattagaccaccggtaaagccatacatagtaccatgcattaaaccagtaactaggccaccgaaggctgagccaatacaacctgaagcaaagaccttcttatatcttaagttaatcccataaatagcgggttcagtaacaccgcagaaggctgaaatagctgctgcaattcctagctctttcatatctgctttctttgatttgattgcgactgcaagaacagctgcaccttgggaaaccattgttgcgcagataattgcgtttaatgagctttgaccagttgaggcaatttgttgagcaactagtggcacaacgccccagtgaagaccaaaaataaccaataactgataaaaggcaccgattattaagccgccaacccagccagatgcagatactagccagttaataaagactgcgataccatttgcggctccttgaatgattggaccggtaataactaatgtgatagttgaaactacaaggatagtaattaatggggtaaagatcatttgcaagtaactaggcaaaactttctttaaccactgttcacattctttagctagccaagcagctaaaatcattggaaagatagagtaggaatagtttaagaattggaagttccaagatccaagactaaacattgtcgtcatactcttgccccaagtaatcatttgtggataaactaagaaaccgccaattactgcagcaatcattggatcggatcctaaccgcttagctgctgcaaatcctactagaactggtagaaagaagaaagcagagtcggccatagcactaactgtgacatagaccggactcttgacgctaagtaaagcaccaagttgtggaagggtgagtagtgcaagtaagcctttgatgatacccgatgctgcaataacaccgattacaggactcattgagccggtaataaaaccaattagattactaaaggctctagaaacaggatttttaccatcatcctgattattagtttgaggtgaaggattgtcactaagaccaggcaattgtttcataactgcatcgtaaacattggtaacctcattaccgattacgacttgatattgaccaccagcatgcataacgtcaagtatgccacgttgattttttaaaatatcatcattggctttagactcatctttcaaataaaagcgcaaacgtgtgatacagtgaatcaggttatttatattatctttaccaccaacattcttaataatgaaagtagctaattcatcatacgaaagtttcttgtctgaactatcttcttttgactcctttaaataagctcgagcaactgtatcgccagcttctgctttaccttcagttacatctaagccatcaagtttcatagatgaattggtgattaaagtcataatcgtagtatcaagatcttttgctttaatcatctctatattcatcgtggcaatttggtcaccagctttaacttcctgaccatttttaattactacatcaaacggttcacctttaagtccaaccgtatcaactcccatgtggaccaatacttctagaccatctttagtagtaattccgatcgcatgctttgtttcagcaatcattgagatagtgccgctaactggtgcaagaactgtattatcagttggtgttaaaccaaaaccatcacccatagttcctttgctaaagataggatcacttgttttacttagtgcaattacttgaccattagcaggagcaagtaatgcaatttcgtttttattcataagtgttattctccctttcctataaaagcgttttcacaaaattcatttattataatattcctgtacgtacaagttgtcaatagatttttatgaaaatgattacatgcctgcaatatagtttttagatatatctattgacatgtacgtacatcaaaaatataatgaacatgattttaagaaaggacaaggtcaagatgactaaagcaaaatctgaactgatcgctcaagacttagcttctaagattaaacatcaacaatttaaggaaggcgagcgcttgcctagtgaaaatcaattgacagagctttatggcgcgtcacgcgaaacagtccgtaaagctttgcagcaattgacctcgttaggattaatccaaaaaatcaagggcaaaggttcgattgtccttaatttggaaaagttttcgtttcctatttcaggaatttctagctttgcggaattaaataaatcattaggaatgaatgcaaaaactaagctacttaatgatgaaatggttgatgatttgccggcaattttcaagaaattcttccctgaacaaaagaagcatgcagggatctatgttgaacgtttaagaatgattaacgatgaaccagaagtgctggactgtgatttcttatttaatccaccaattactgagcttccatcagaagaagcagaaaaatcaatctacaattatttagaaaataaattagggctagatatatcctatgcaactaaggcaattacggtagaagaaatcgatgctgatttacaagagaaattgcaattggatagtaaggaagcagtactagtagctagtcataattttttagcagatacaacgctgtttcagttaactttatcctttcataatcctaaaaagtttaaatttattgactttgctcgtagacagaaaattaagttataggagataaaaatgacagatttaggcaaaaaagtaatttaccaaatttatcccaaatctttttatgattctaatggcgatggagtaggtgatattccagggatcatcgctaaaatcgattacatcaagaagcttaacgttgatatgatctggtttaatcccttttttgtatcccctcagaatgatggcggttatgacattgcggattattaccgaattgatcctcgctttggcacaatgtctgactttgaggaattaactaaaaagctaaaagaaataggcgttggcgtcatgttggatatggtgctaaaccattgttcaaccgaaaatatatggtttaaaaaagctttggcaggagacgaaaagtaccgcaaattcttttacttaagaaaagctaagcctgacggctccttgcctaataattggcaaagtaagtttggtggaccagcttgggcaaaatttggtgatacggattattattacctacatttatatgatccaactcaagcagatctcgattggcataacccagaagttcgtcaagaattgttcaaagtaattaacttctggcgttcaaagggagtacatggtttccgttttgacgtaattaacgtgaccggtaaggatgaaaagttagttgattcaactggtgatccaagtcaggaaaagagtctttatactgatacagcagtagtgcatcaatatttgaaagaaatgaatcgctctacttttggtcaagatcctgactcaattacggtgggtgaaatgtcttcaactactattgctaattcgattgagtactctaagccgagtgagcatgaattgtccatggtctttactttccatcatttaaaagtcgattataaaaatggtgaaaagtggtctaaagagccgtttgatttcatgaaattaaagcacttatttactgaatggcaagaaaaaatggatcaaggtggcgggtggaatgctttgttctggaacaatcatgaccagccgtgggcccttaaccgttttggtgatactggtaaatatcgagagaaatctgccgaaatgcttgctactgtgacacattgtatgcgcggaactccttacatttatatgggcgaagaaataggaatgatggatccacattattcttcaattcatgattatgtagatgttgaagctaaaaatgcttttgcggcattgaaacaaaagggaataagcgatgatgaagcatttgcaatagtaaaaactaaagcacgagataactctcgtgtgccgatgcactgggatgatagtaaatttgctggctttagtgaatcaaagccatggcttttaccaacagatcaagatagaattaatgttgaaaaagaattacacgagggtgaaatttttgcttactatcaaaaattgatcaagttgcgtaagcacgaacaactgatttctgatggccatattagaatgtttttaaaagatgatccacaaatttttgcctatgaacgttttttgaaggatgaagctaaaaaaatattagttttcactaatttcaatggtactgatcatgtagtaccattgcctgaacaatatcaaaataagaattatcaactcgtattgagcaattattctgcacaagatggcaaactaggagagaatatctcattgaagccatatgaagctttagtaattaaaattaattagactagtataattaattgtgttaaggtaaaaatgttcgtgaagatttcgatttacggacgaggaattcgcgagaagtcatgattttcaggtcatggcttttttttgcataataagcaaaattatgtaaagtaattgacagcttgcttataatagatagtagagagaaggaaaaacgatgttagttgattctgatagttttatttcagttgaaaagaagctactcaaacaaggcaagttgcaaaaatttgaaaaagaaactggtccagttaccagtttaatgatgattagtaaaggaagaattgcggacgatatgcgttatcagttagtcgagaacttggcacatcatccattacatatagtctacaaggcctcatttgatcaatatgatgaaaccctgaattgtattttcgatcgacaaactaaaaagccaatcacaggtttatggtacacgccgcaaagaagagactttactgaaccgcctaagaaaatggtccagctttttatcagcgaaattgtaaataatttgactgattcaacaggaatagatttgccaatctgggtctttatcaatgataaggcacatttggcagttactaagaaagatttgagttaagaaaaaaatcagtgcgaaccctatgtgaacataaaaatgagggagtttcgcactgattttgttttgtattttatgtgttaactcttctttatatatttttgacatagtataatagttgatgaagccaaatatttaccccagtcaaaagtaggtgctttgcacgtcgcactctatgtgagtgcttaaattaaattcaactcttgcaaatgcaaaaaagcatccctaatcaaaatagagaaggggatgcttttttaatatcattattgacgccaagcgctatctaatttttgttgaccagccttaatttgagcattaacattttgatgcttatttgcagcaattaaaatattttccataatttgattcataccattataagcagagtcagaattcttagctacaggaacactgtagagatgcttcattgaatcctttaagacacttggcaatttcatcttgctgtctaagtattccttactatttaagacattatcgttaacaggaatatagccagtctcattagcccaagttaattggctagatttgctagtcaaaaacttcatatatttcatggcagcatttttttgtgcttttgaagcatggttaaagacataaagatcagtcccttgagaaatagtgtattcaccgggacgaggagcaacgccgtacgtaaacttgttgcctacacccatcttagtgtagctttcaccagctgaagtaccgatgtacattgcgactttttcattagcaaaaggaccggagaggtaacgttcactaccagcagttctaaagtagccattgcgtacgccatctgcgtagaagttaataactttcttagaggcagccgaatctaacttgattgaacgaccaaaagtttgtccttcattcttgagacctagaacatagtagttggctaagttatcaaaaccagcaccaacaattttatggttggacttttcataaattgctttagaaacagacttaagttctgccattgttttaggtacctttaaaccatattttttaagtaaggtcttgttataagtcaagacttcaatagatttgttgaagggaataccatattgaacgccattaatttgcgcacccttcattaattcaggacgaatattagatttggctactgagccccaaccataagttgaattattaatgtatggagtcaaattgaccaacatcttattttgcgcagcttgataaagccaaccaggataagcttgagtcattgttggtaagttattaggattttgttgagtagaagtaattttcccttgtagctgagggtaattaccttgattttctagcttaactttgatgttaggattttctttttcaaatttattagtcaattgtttcaaagttttttgttgtgcaccattcattgcgtgccacatagtaatttctgtcttactatttttagcagatgtagtgctcttttgatttgaacaagctgctaaaaataatgctgcagtagttactgcaccaattgataaatattttgttaagcctttctttgtcatcgaattctcctcactaaaaataacattaataaaaatgaaatttaaaatatatttttattttaataagcacaatatcttgtatcacttattaactaatgcaagataatatactattggctaaaaaaagaaaattcaatccttgactttttgccagcatttataagcattgatatatcaacgactatttacttaataaaaatattagtagcaagagaaatttaattaaaaaacacattttattaaatacaatatcttgtgtatgataaatgtaagaatcaattaagctaaggcaaaataatagctattttctagcaaatagcttataattaataatgaagttaagaaaagaaaggtcgaattttatgaaaaaattagatactactaagcttactgatgaacaaattgaattttttaactcacacttaccatacatggcaactgtgaatgctaacggtgtgccacaagttggtcctaaggcttcacttaaggcaattgatgcttcaactattcaatatcttgaaaagactaagtcaactgcttatgaaaacttgaagaatggttcagtagcagctattgttgtcgctgatgttcctactcataaggcatttcgtgttttaggacatgctgaaattcatgaaggcgacgattacgctaagaagatcgtttcaggcactgatactcctgaagcattcgtagttaacattaagatcgaagaaatcgacgcttaattcaatattttatcgcaatgaggcatccctagcagggatgccttttttgttggtataatgatgagtagttaaagtgaaaatagatttttgaaaaaggtaaattgtgattactagtaaaaagaagccaattctttggttattatcagatacacatctaattgcagatagtttacatgatgatggtcttgcttttcagcatatgcgcaacactagtgcaggtaaagacttagattatcaggaaattgctttgaccgcgtttgtacgtaaagtaatccaagagaagcccactgcagtgataattactggtgatgtaacctttaatggcgctaaaatatcaggagaacgtttagctaatatttttaagccattaactaaaaataaaattgcattcttagttttaccaggaaatcatgatatttttgacggctgggctcgcaagtttaaaggtgatcatgaagattacaccctgcaaattagcccagctatttggaaagagatctttgctgattcttatcattatgctttacatgaagattctgattcactggcttatagcgttaatctgaataagcagtatcgactaatattggctgactcaaatatttatggcaagcaggaatcacaaactcatccgattactaacggtcgaatttcagaatctcaaatgaactggattgaaaaagaattaattgatgcgcagcaaaagcagcaacaagtgctattctttatgcatcataatctgtatcgccataataaagtaatctatcagggatatattcttgataatgcacttgcactgcaaggtttattacaaaaatataatgtaaaagcagtcttttctggccatatgcacgcacagaatattattggtccgtttgctaatcgaccaattgcggaggtagcaggagcttgtttttgtatgactaagcaggaatatggtcagctatatttagacgaagcggggatgcaatatcaggtgcattccttcaaaatggaatcgtggttaactgcagaagaaaagcaaaaagtgccaacagatttttcgcaatatttgaagcatttgttttttagtttggatgaaaagcaactaaatcagattgcgcaagctttaccagataaaaatgatgctaacgtggtcataaaatttgtagatcaattgaattggaacttttttgtaggtgaaagtaattattctgcagcccaaaagaaagaaattgttaattcacgagaatatcatttgattgcaaaatatttacctggttttaagcgctacgttgattcatttttacaggtagagcaaagtagccataaactgaagcttaagtggtagtgagattagttgctgtaaaacggaagcagattaccttagtctgggtgatctgctttttttattttttatacttaaataactgttattttataattcgattgataaaagctatattgctcttataatcaagtatttcgataagaaaagaaggcatgaaaaatagtattaatctatatgtaatgtttctttaattacatatctattaagaaatatgattaaactatttaaaaagagcactcattgtgctaaatttatgaaactgtcaaatcttttgtgtaaatagttctttctcgcaaattgattttttaattatttattcaaaataagattctaaggtatcctgaacctgaccaaagcctttatgaattcggttgaaatagcggtcattgtagctcattgcctggatgccaataaatgcatcaagcgactgttcagttggaaattctgccttaggcttagctttacgcttgatgacgttgttaaaggattcaatcatattggttgaataaattgaagctctgatttgtttgggataattgtagaagaccagcagatcgggctcaatttccttcaaacctttgatgacattgctataagctttattccatctggcatagaatttgtgcaagacagctgcagcttcttttttgcttgtctgttgatgtatctgcttgaattcgttcatgatcttttcgcggtcatccacccggactttagcacagatattgcgcatgacatgaaccaagcagcgttgaaaatgagctttaggataagtcctggccaaggctgttttcatgccaacaacaccatcagaaagaaaaagctcaacttgctttaagcctcgggatttcatgttttgaagcatatctgtccagacttcaatgttctcgctaggtgcaatgcagtagtcaatgacctccttgtgcccattaggcttgatgccaatggcaatatagactgcttcacgctcaaacgtttctcggcgcaaaggaaggtatgtcgcatccaaatagacacagaaaaacttgtcgcttagcttgcgcttgtgataagcctcaaccttggggagcatctgcttggaaatatttgatacttgagctggactataatgactgccatacattttctcaatcaagtcagcgatttctctggtagttacgcctttggagtagagcttgataatcgtgctttccaaaacatcagagtgctgcttgtagtcaggcagcgtgtgctgatgaaactgaccgttgcggtctcgaggcacttgcacttcaattggtccaaactgggtatcaaccttgcggaaataagcaccatttctagaattgccagtattccagccatttctggcatagggatcatagcctagaaaggcagtcaactcagcttctagcaagttattaacagcctgttgtagctctttgcgcaataaatcatttattttgtctggattgaatagagcttgagcaaaatctttggtaaaatcattcatgaaggagttcttctttctgtatgtgtttttttgttcaaaccaatcatacgagaaaggaactcctttttctaatgtttaaagaaataaatttaaggaatcattcatccttacacaaactattttacagtctcaaatttattttatttgaaagtgatcgcgtatataaaatatagtgttaaattgtcaaaataaattataatatagatatgctagaaagaagaaattatcaaaagaaaaacttaaaatcaattgaaactcaaaatcattattcggtcagaaaattatcagtgggtgttgtgtccgcaataattggcttctctgttttaggattaagtagcatctgatgaaactaaccaatcttctgaatcttcaattagtagttctgatgatccaagtgaacaaaaaggtcaggagacttcaactgatgaagaagtattcttaccggcactagcaaaggccacagagcttgagcgtcatgccaaagataaaaaaagaaagcctaccactcatcgagttggtctgcatagtgaagcatcaccagtaggattaaactctgttaaaactacagctgctcaaacggaaacttctattatgaaaaacgatacagtagaacaaattacaccgagatcatcctctaagtctgttttaccagcaacctgtaggcaagatagtgatctttcatggttagggttattactgtctggcttgagtttaagtggattatggactcgtaagaagaaaacaaaataaaatcgaaagagattgagacactgggtttcgatctctttcttgataggctcaatatcaaggaataaataactataactgctataatgatgatatgagtactaactgatcaaatcttaattgcatttattagatcgaaggttcattatgaaaatcaataaaaaacttatcttaatttctactgcgttattggctgtgtctccaattgccgcagcaccactaacttcaaacgttcaaacatcagttgccgcagctactaaaagcaatgcaactggctccttaaaagtcattgattcacatattatgttgtacaatagctcgggcaattatttggatcatatttctgcacctaagaaaggtagcacgattaaatattatggaaaaccattttttaagacggttgatccaggcgactacagtgctggtgagttatactatcctttacgcaagaatgtttatatttcttcagattatgtaacgccaatatctggccctgcttatttaacggcaatttttaatgccaatatttacaataagtctggcaaaaaagttggctttgttaaaaaaggtagcgtagtcaagtacgttggcaaacggaaaatcactagtggcaaagcaaaatactattatgaagctaccaaaaataagtatcgcatcccttacactaagattaagggcaaagattactactatttaggctctggtcgttacatcaaggtcgcaaatatcggttacgttgatggctatcgtctaatcactcaagccccaattactgtgaccgttaataagaacacttcaaccatcacaagatatgttaattcaacaggttggggtacagatcctaataatattgaattaaagaagggacaaaagatcacagtcgattatgctgggcaattcccacaacaattgaccgactttgatcatgatcactattcatactaccggatcaagggcactaattattgggtatcagaagatgatctgaatttgccacaagctttagagaatcattcagatcttgaattggccgattctaccaaagttgtcttggataaaaagattcttttgtacaatgttgacggtgaaaagacaagtcaagagctatctaaacagttctataccaatacggttgaagaaactgcaatgtatagcaaccacaaaattaatgaagcactctatctttgggtaccaagtgaaaagaaagctgaacttttctaccatacaacaggtgaagctaatgctaaaactaataagttagataatgaaggctatatcttggctagtaatgtcaaaaaggttgagggagtaaaacttacgccaatcaacacagccggtgaagcagaatcacaaagcaaggtggcaactaataagtcatcattgtctactgcaattgccactgcagaaaaggttcaaaagactgatcgctataaattagctgactatgataaaaagatacagttcttgacttatttgcaaaatgctaaaactgttgttggtgagacaaatgccagtgaagttgcggttagtcaagctgacaagtttttaactaatacgactaaagcacttgatggtaaaaagttgctcgttagacgaactgatcagttaactacttatgaggttcaaaaagtgatgaacctgatctacaactattaccagcctcaagttacaggtgagcttgacgttcaactttataacagcaaacgtaattggcaatatccaacaactcgtccagtatgggatgttaccaagaagagtccattttggtttggctattcttcagataccattagaaagcgcaaagtcgatattagcccattaatcactgatggcattactgttggcaagaaaaagaaattgcaaagtaatgcatacgtttatactgctaaaggtataaagacgaaaaagttactgaagaaggggaccccttacaaaattcaagcaattatgactattaaagggcaaaaaaatgtcaaaattgatgtaaataaatatgttaagtatggtaatttcgaagcatctaagctaaaagtggtcaaacattactacactgtgcaaactgtaacacctgtggtaaatgcccagggtaaaaaagttgccgaaatcaagtcaaagaataccaggacaaagaattatgtccaaacttatggcaccaagaggatcaaaggctatgattacattaagataggtagtaatcgctataccaatatgttgggatttgaatatgttttggcgaagtagggttcgattgattatttagtttatgttaaaagaagcactgtgttggtgcttctttttttgtacctacactacttgttattaaatggggcttcgaggtagaataaaactatatttactttaatattagaggaaaaacaatgtctaactttgaaacttcacaaaaagattatcaagaatacgcaaaattggcttccagcgctgaaagcttaatttactctgatcctagaagtagtttgacagtttttggtactttcggtgagcaattaactaaagaaatcatgcatttggatgatttaggtgattgggaattaaaccaaaaacaacgaattgaaaaaatggcatattctaagaatgaatatccacctactgttttgaatgctcttaatttgatcaggttaagacggaacaaggcaacgcatgacgatcattttattgctaccaaaaagattgcgcttgaaattgatcagagtgcttatttggtatggaaatggtttttagaagtttattctctggataaagttgcagattatgttgagccacaagatcaaaaagctttaattaaaactcaagaagataaaatcaaagctctcgaagaaaagataaagcaattacaacaaaatagggtgcaggaagtcataatttctcctgaagagcgtgaacgcagacgccagattaacgttcaatttgctaaaaaacatgagttaactgaagcagaaacacgtcagttaattgatcaacaattgcgagatgcgggctgggaagtagattcacaaaaattgaacaattggacgcagaaaactgaaccgcaaaaaggtcacaatatggcaattgctgaatgggttctacctaatggtcagcgagcagattatgcattattcaaaggtttggagttctacggaattgttgaggccaaaaagtgggaccaagatattgtagggcaaatggcacagcctaaggaatattctaaagaggtaccgtttagatcagattatcgtctagtttcaaatgaaatgggtgattacaaagttccattcatctatactgcaaatggtcgtccatatcttaaacaatatcaggaaaaatctggtatttggttctgggatgcacgtaatcataaagaaagcgcatatgctctagaggaatttcataagccagaagatttatcgttgaagctttctgctaaaaataaagaagaagcaaatcaagacttggtagatgatcaagattttcctgattttgcacatcgtgaatatcaaattgctgcaattcaagcgatggaaaatgccatcaaagatggaaaaaagcgtattctgcttgccatggcaacaggtactggtaaaactagaacggcaattgctttgatgtacagactacttaagcataagagagctagacgtattctttacctagttgaccgtaattcattgggaaagcagactgccaatgcaattaaagataataaaataggtacgatgtcaatttcttccatttatggattaaaggaattgagtgataaggcacctgaaatatcaacaaaaattcaaattgcaacggttcaggggatgatcaaacgcctatttttcagtgaagacagtgatgataagccatccgttggtcaatatgatttcattattgttgatgaagcccaccgtggttatgcagaagataaagagctcagcgataaagaatatcaattctatagtcaagaagattatgttagtcaatatagacgtgtagttgattattttgatgcgactgctattggaatgactgctacgccagctttacaaacgattgatatttttggcaaaccggtgtattcgtatagctaccaacaagctgtcctcgatggctggttagtggatcatgatgcaccagtaattattcaaactcaattgtctcaagaagggattcattttaaaaagggtgccgaagttagtctttttgatcaggatgaaaaaactatcaataaagaaaaattacctgataatatgaattttgatgtaaaagactttaataagagagttatcacacgtagctttaatgaagtagtttgtgatgaattagctcaaagatatcttgatccaaatgatccaaatttaggtaaaactttaatctttgcggcaactgatgaacacgctgatatggttgttgacttattgaaaaaagcattcaaaaaagtgagtaatcctgtagatgacgatgctatcgaaaaaattactggttcaattcggcatcctaatcaagaaattaaaaactttaagaatgaaaccaaccccaatattgcagtaactgtagatttactaactacgggaattgatgtaccgcaaattactagtattgtcttcttaagaagagttcagtcaagaatcctctatgagcaaatgttgggacgggcaaccagactttgtcccgaaattaataaatccaaatttacgatttatgatgccgtcggaatctatgaagcaatgaataaagtgacaaacatgaagcctgttgttaaaaatccaggacataatgttcactacttcttaaatcacaaggatgatttctttgagacaaatgaggattccgctcagtatcaagtagatatggctggtgccgttgagagaaaaattaaacgtttggatgatactaaacgtgatgagttccaacatctagctgagattaattcggttgatcaatgggcccgtgaattaagtaagttagataagtcccaatttttaaagcaatggcctaagtttgagcagttagatcacatcaaacctgtcaaacccaagcaaataatatcagacgcagtagacaaagtaattaatgtaagtcgaggttatgggcatggcaatcaaaaaccagcggattatattgaaaacttcaataaattcgttaaggaaaacgtcaatactattccagccttacaagttgtagctactagaccgaaggatttaacttttgatgaactcaaaaatattaaacttaagctagagcaaaatggctttaaagaaaatgatttgcaaagtgcatggaaaaacgttaaccatgttcagaccactgccgatattattagcttcattagacaagctgcggctggatctgagttggtggatcatgatgttagaattcataatgccatgcaaaaagtttatggtttagctgattggactattcctcaaaagaaatggttgaagagaattgagaaccaattaatttcatctactgtattggggccaaatgctgagaaagcctttgatgataactatttctttaaacgtcacgggggttataagcaaattaagaagatctttccagaaaatgctgatcagattatttacgtgttgaatgagaatttatatgtttaaaaatgccattactggtattttttgcttttaatcacgaaaagttgtgataaaaaaaggcgtgtgctaaacttaaattaacacggaggaatacaatatgttaatcgagttcactgttaaaaattatgcttcttttagagagcgcactaccttgtctgcagagacaggcaatagactacgtaaattgaaagaaactaatactttctcaagtaaaaatccatcattattaaaaagcttactgttatttggtccaaacggttcaggtaagtctcaattgattcaagctttacaaacaatggaaggaatagtaacacgtccaactcaagccgtaactgataagttaaattattatccttttttgtttgatgaaaagtccaagattgaagatacttactttgaagtgaagcttgagttaaaaaacaaaatttatgactattcatttagttacaatcgagagagcattaccagtgaagcattaaccttaattagtggtaacaaggaaaaagaaattttttctcgaaatggaaatgacattcaagtctctaacaagcttttggaagacagcattcctaagcttagagataattctttattcctatatttagcacaatctgaaaatgatgcagattgtattgctatctataagtggtttgttaatgatctgatttttattggcagcggctatccagtaaatattcctgacgaacttttaaatttgatggaagatgaatacctcaaaaaagaaatgatctcattcttaagttttgcggattttaatatctctgatattagaattagagaagtacctactaatccgttgaatccacaattacaaaagattgtagagaatttaaatattgattatcctaaaacaactaaagaactatatacggttcacaagatttatcatcaaaatgaagttattaattctggggaacttccattaacacaagagtctgttggtacacgtcgtttattttatatagtattagcaatgatgcttgctcaaatgaatggtaacgagaagacgattgtaatcgatgaatttgatgattcactgcatgttgaacttgcagctgctttagttcgtatttttaattcaacagaaaatttgaatcagtttattatcactactcatgatattcagctattagacagcgatttaagaattgatcaaatttatttattagacaaggattttcacggaattagtgatttgaaatcaatctttgactttgaagatgcacgtaataaaggtcgacatgatatttcgtttgctaagagatacttacaaggccgattcggtgcagttcctgtaatagatgtagatggtttgctagatgtattgcaaatgattcatgaaaaatatggggatgagcatgggaagaataagaaataagactaagtctaatccaattattggaattctgtgtgaaggtgaatctgaaaaacaatattttactatgcttaagcagaaatatcgtttagcaaatattaaagttaaaatagttgctgcagatttgtctggtaaaagtctagtagaaaaagcagttaagtttggcaaatataatcatttagataaaacttatgttgttttcgatagagatgagcattctaaagatgaattaaggaaatgcgctaaacttgctcgaaaaaatgatattactattatgttttcttcaatagactttgaaatttggattttaatgcattttgaaagtgtcactcgttcttatactagaaaagagctagtacagaaactgtctagatctgcctattttaatcaagattatagtcgctttaaaggtaatagttatcgagaatatatttttgataaagtgcaagatgcagtagatcacgccaataagttgtatcggaaaaagagtgactggattaatgatgatccatttactaatattcaaatatatctaccggaaatcttcaaaagagacaatttttaaaggagcaaaattaagtgaacaatcaagaaatcgttcaaaagttatggaatgaatgtaatattttgcgtgatgatggtgtcagttaccaagattacattactgaattaacttatatcttattcttaaaaatgagtaaggaacaaggtgaacaggatgatatcccccaaaaatatcaatgggataatcttgtttcaaaggaaggactagagttaagtaacttttatcgccaattattacttgatttaggtaatcctgaagtggttaatagtccaagaatcaattcaatttacgctgatgcttctacttcaattcacaaacctgctgacctggaaaaaataataaaagatattgacgcacttgattggtggtcagctcgtgacgaaggccttggtgatttgtatgaaggtctaatggagaaaaacgccagcgaagtcaaatctggagcaggtcagtattttaccccacgtgtgttgattaacatgatggttagaatgactcagcctaaaattggagatcgctgtaatgaccctgctgctggtacttttggctttatggtagcagctgacagatatttaaaagatcaaacagatgattattcaaccttgtccgcagataaagaagaatttcaagtaaaagaagctttttctggtatggaattagttgaaaccacgcaccgtttagccatgatgaatgagtatcttcatggcatggatggacgattggaactaggggattcattatcttcaaatggtaaatggatgaaagattttgatgtagttttaactaatccgccatttggtaccaagaagggtagtgacgacagtgtaagtcgtgacgacctaacttataagactagtaataaacaattgaacttcctgcagattatctacaattcacttaaacacaatggtaaagctagagcagccgtagttgtgccagataatgtattgtttgccgatggtgttggcgaagcaattagaaaagacttgctcaacaagtgcaacttgcacactatcttgagattgcctactgggattttctacgctcaaggtgtgcagaccaatgtattattctttactcgcggtgaaagtgacaaggataataccaaggaaacttggatttatgatatgcgtcatcagatgcggtcatttggtaagcgtaatccattaagtgacaaggattttgcggaatttgaaaaactattctgcgttgacgatcgctcaaagagaaaagaaacttgggataaagagaagaattctaacggtagatggcgcaagtttacgattgatgaaattttgaagcgtcctaatactagccttgatatttcttggatgaatgatgaagaagagcacgataaccgttcgttgaaagaaatcttagatgagatgaatgacaagtctaaggcaattagggatgcaattgcggaacttaataaggcgttagaaggaattgacgatgaagactaatactttagattttgatgcacaggctttaagagaaaaaatcttggatttggccatgcacggaaagctggtgccacaagatcctaatgatgaaccagctagtgtattgcttgagaagattaaagctgaaaaagagcagttgattaaggaaaagaaaattaagaaaagtaagccgcttgctccgattactgatgatgagaagccttttgatattcctgatagttgggaatgggttagattgggggatgtaggtttactaaaaaatggaaaaactcccaagaaagaagacataagtagtgataatatttatccatactttaaggttaaagatatgaataataataacttatatatggaaaacgtgaaaaattgggttggagaaaaatatagccgacaagtaatgcctaaaaatacaattatttttcctaaaaacggtggagctatattaaccgcaaaaaaaagaattttgtctcaagattcattggttgatcttaatactgggggattaataccatacaatgacttaaatcacaagttcatattctatctgtttttaagcttggacataaaagactttgtaaaaggatctgctgtaccaacaattaattcaaaaaagttgaaagaaactcttgttccacttccaccacttgaagagcaaagtcgaatcgctgctaaaatagcgcagctattcgctttgcttcgcaaagtcgaatcttctactcaacaatacgcaaaacttcagactttgctgaagtcgaaggtgctggatttggcaatgcgtggaaaattagtcgagcaagatccccatgatgaaccagctagtgttttgctagagaagattaaggctgagaagcggaagatgatcaaggaaaaggagatcaagaagagcaagccgttgcctccgatcactgatgaggaaaagccgtttgatattcctgatagttgggaatgggttagattggggaatattgcaaaaaggattactgatggtacgcataatcccccaccgaattcacatgaaggaaaacaagttatctctgcaataaacattaaaaaaggaaaaatagatttttctttatcaaatagatttgtttctgaagatcaatttttaaaagaggataaaagaacaaacatccgaaagggagatgtattactcactattgtaggctcgttaggtaatgctgcagttgttgatactgataaactttttacagctcaaagaagtgttgcggttattagtagtaatattttaagtaagtttctttattatgttttaatttcagcaatgtttaaaactcaaatttttgctaatgcgaaagggacaacccaaaaaggaatatatttgagtaaattaattaatttgaaattacctcttccaccattagcggagcagaatagaattgttgctaaaattgacaatttgtttatatattagaattaacttttaagagatgaatttatataatacgaggagattaagtatgcagttgtacagagataaagaaatagatatagagttatcgttacctgataaatataataaacaagataaaaagaaagcactaagtaaattttatagagataaaataaatccagatgatgataatgatcatgattttgtgtttttagaaaagcaacttcataagtttctcaaaagggctgttttgcgttttataagtaaagattatagtaatgttgtgctattagttggtgccggagcttcagttgtaactaatgagaatggaaatattaattcaaattatggaaagactatgcaagatatttcatggaatattttcaatcagctttatggaacaaataatttagaagaatatttagatgaaaaggatgctaagatctttttacctaaagatcaacaagaaaaatttgaaaaagttaattttgatgatgaaagtacatggttttcttttccattagaagaatatatttcaaatttaaatttatatattcaagacgcagagatgtctggtaaaaaagtcagaaatccaagtttatcacaagcaaaaaaattaaaaagatttattttactatcaatacttgattcagttgattataatttcgatagtacatctaaaatgccatttaagcatgataaagtgattttaaagttgcttaatttaattcattcggatagcagtaaattgatggttgcgactacaaattatgatttagcaattgaaaaatctctggaaaaagataacttcacaatatttgatggatttgaatttggaaataataaagaattcaatgatgatatgtatgagtgggttttgagtaaagaagttaacaatattaatactaaacaagttatctataaaaagcatgttatagatcttcttaaaattcatgggtctattaattggattgaaaaagaaaataaagttactaaatcgactgtggaagaggtaaaaagtacgattagagataacagtaatcatgtaaaaatgatttttccaagttctaataaatatgctcagagctatgaggaaccctattttgatctcatgtctcgatttcaaaataagttgcaccaacctaatacattattagttacttcgggttttagttttggtgataatcacataagtagaatgattataaacgcaattaagcataactcaagtttagattgtttgattactgattataatattcataattttgataaaaaaacagaacaagaagatgttaatgacaactggagtgatttagatgatttgagagatcgaggatataatattgcttttcttaaagcaacaatgtgtagttataattatgatttatcttattatgtgggataactatgagtttgatagataacttttttgatagttcagacaaaaatttgcatgtagacaaatgtgaatactatttaggtaaaatatctactgtatcttctatttttgctaatattcaaatagaaaacatgagtttattgaagtatcgcttcaatcaaagtgatgttttacgccctaatactattaattatcatgttttgattgatagtaatggcacaattttcgaaactgtcaaatcttttgtgtaaatagttctttctcgtaaattgattttttaattatttatttaatcaaagtaggattctaaggtgtcctgaacctgaccaaagcctttatgatttcgattgaaataacggtcattgtagctcattgcctgaatgccaataaaagcatcaagcgactgttcagttggaaactctgccttaggcttagctttgcgcttgatcacattgttaaatgattcaatcatgttagtcgaataaattgaagctctgatctgcttgggatagttataaaagaccagcagatcgggctcaatttccttcaaacctttgatgacattgctataagctttattccatctggcatagaatttgtgcaagacagctgcagcttctttttggcttgtctgttgatgtatctgcttgaattcgttcatgatcttttcgcggtcatccacccggactttagcacagatattgcgcatgacatgaaccaggcagcgttgaaaatgagctttaggataagtcctggccaaggctgttttcatgccaacaacaccatcagaaagaaagagttcaacttgcttcaagcctctggactccatgttttgaagcatatctgtccagacttcaatgttctcactaggagcaatgcagtagtcaatgacttccttatgtccattaggtttaatgccaatggcaatatatactgcttcacgctcaaacgtttctcggcgcaaaggaaggtatgtcgcatccaaatagacgcagaaaaacttgtcgcttagcttgcgtttgtggtaagcctcaacctttggaatcatctgcttggaaatatttgatacctgagctggactgtaatggctgctatacatcttttcaattagatcggctatttccctggtggtcacgcccttggagtaaagcttgataatcatgctttccaagacatctgagtgctgcttgtagtcaggcagcgtgtgctgatgaaattgaccgttgcgatcccgaggcacttgcacttcaattgggccaaattgcgtatcaactttgcggaaataagcaccatttctagagttgccagtattccagccatttctggcatagggatcatagcccagaaaggcagtcaattcagcttctagcaatttattaacagcctgttgtagctctttgcgcaataaatcatttattttgtctggattgaatagagcttgagcaaaatctttggtaaaatcattcatgaaggagttcttctttctgtatgtgtttttttgttcaaaccaatcatacgagaaaggaactcctttttctaatgtttaaagaaataaatttaaggaatcattcatccttacacaaactattttacagtctccaattttcttagggaaagtaataagttctaggattaataatactgataatattcataaggcagtaatagaaaataatgatgatattatttacccaaatattgaaattaaactaatggcaatgtacgataaaaatacgtttgtattgcccggagatctaacagtaggaattggtgataaggcatatatctgtaatgatgaagctattaagaaatatataaattcattagaaattaataaaagggataatcaaattgaattttcaagctttaatttaaatgaaaagaaagctattccattcaaaattagtgttgatggattatttaatcaccattttatgattgtaggagcaacgaattctggtaaatcaactagtgcattagcgattttagataaatatcaaaagctaaaaggaaaatttttgattatagatccaactggtgaatataaagatgcattttcaaaaaatgaggttaatttaaaaacaatagggaaaaatttattcttgaatactgctaatttgactgatgaacaatggatttctttatttaggccaaatgataattcccaagtgattgagcttttagaggcaataaaaaaattaaaatttgttcaatactataaaaagcatttaaataaggtaaatttaaccgaggcagagaatagatttataagaaatgatattcttgactgtgaaggggcaaatcaagaacagtacaagcatcttcagattcagtgggaatctgataaagtttttaatgaatcatttgatataaacaatttagataaacaaattgagaaagattctttaaaacttagttggaataaaggtataaaacaaggaacctaccagtttgattattttacatatggagctaattcttggctaatacgtaaagtaaaatatttgattaagacgtataatctaaaagagttatttttaaacgtagatagtaaaactcaagataaggattttggagaaacagataaaggtaaaaagatactcaaagaccttaataaagaaatgttagaatttcaaggtaatgacatatcattatatatacgtttaaatgattccaaattttcaattggattaggacaagtaattgtagactatataagtaatttcttattaaatcatgatatgacaaaacatccaactttattatttgttgatgaagttcacagatatgctttagaaaaagatgctcaagatgattttatttctcctctggctacgttagcacgagaaggaagaaaaaatggaatatttctatttttaactactcaaagccccaaagatgtgccaactatagtattaaatcagataggaacacttttaatgcatcggttaactggtgaatatgaaattaaagcaatcaataatttcctaaataaagacaaattagctcagttgtcgagtttaaagtcaggagaggcaatattgactagcgtaaatttgatgcaaccagtcaatcttaatataaaagcttctgggcgaacacattacagtaatacgcctaagttgataaagataaaaaatgattgactacaaaactttaaaacatagtgaaaatgggatgccaacttgggatgcatttttaggtcccatgctagaggtagcgagtactaaagaagaatgggtaggtagagagcttgataagctgttgtcacagagattaatttacctgaagaacttgttaatttaagatatccttctaaatatcatgatttagtagcaattagtcgagtagcttgggcgcttagtgatttaaaattagctggtttactaatctcaccaagaagaagtatttataaaattagtgatactgaaaaactgctattaaataaatatggtctaaacatcactcgtgaattagtacattctcaaccagcatatattgagcaccagaagaagtttcaagagaaaagcactactgatgaagaagtcttagaagagcagacttttgaattagccgaagaaaagaagaagaaggatgagtacgataagctaagctccgaacttaaagatgctaaggataaaaaagaagaacaagagaaggagcaaaaagaacaggcaaaagcagctgctaaaaaagctactcaaatagcaaaacaatcacggcaaaacgagtcagctcaatctagtcgttcaactgcaacacatcattctaatggtggcggcaatcatggagacctagatacagcagaaactggcaaaattgtcggtaacgtcaattctaagatttatcacgtaccaggacaagcaggctatcatatgaattccgcaaatgcggtttacttcaatagtgagcaggatgcaatcaatgctggttacagaaaggcaaaaaggtgatgaataagaagaaaattattacacttgtttcaagtacgttgtttttgtttggcggctatggtgcgattactaatcctagtctaagtcaaaatgtcatcgccaaggttaaaactatcatcaaatatgaccacagtgctgagaaaaagaccaagcaaattgcgcaggaaaacaagcaaactgaaaagaaaattgttagcctagacaaaaagattgctaaactgcgcaaagaactcaagaagtacactggcaaacacaatattgaatctgttagtgccgcaaaactggcaagtcttaactattctgggaaaaacatcattacagtaaataacaacgatcctagtttttctaagagtgacttgagtactaatcgcggagcatggcaagaatatggtaacctcgatggtttgaatcgggtaactgccgcaaacgcattgcttattcagtcgctgatgccaagcgctagacgcgaaccactacatgttgatcctactggttggcataataaacgagttgctggcggctggctctataatcgctgccatttgattggttatcagctaacaggacagaacaacaacattaaaaatttgatgacaggtacaaggcagctaaatgatcctgatatgttgcgctatgaggatcaggttgctgattatgtaaaagaaagtcgaagcaactacgtccgctaccgtgtgacaccggtctttcgtggcaatgaactattggctcgcggagttgaaatggaagggcagtcggttaactcaaatgcagttcatttcaatatttacattttcaacgtgcaagatggcgtaactttgaattatgctaatggtactagtcgagtagggtagtagaaatgagatacccttattgataagaagatgactgagattaatttctcggtcattttttattaatgatatttccttagaaacaataatattgattctattaaacaacgtttttcaattcgtaaaataacaatcggtgcagtttctgtactaattggattgacttttatgagttactctagtcaaacagtacatgctgatagtgttgatgcaaattcatctgatagtgctactaccagtgttataaaggaccaaactactacagagcaagttgcttccacaactaaaacttctaataatgtagatacaaatggtgccaataaaactgaagacactactagtattgtgaagacaaaatcgactaacaaagttgatctttcaaatactgatttaactactaagaacaattcaatcgatgataactcaaatgtcggatcatcaattgaaagtaagaacaagatagctactaatgaaaacaagcaggagagtacgacttctaccaataagcaagctactacagtagcttcaactagtaagacacaagctaacaccactcaaaatagtcagtacaacactgcagattgggatggaagtttagatcaaaattctcatcaatacactttaactaaatataagggtactggtaataaaaatatttacatccctaatacccaagattttatcaatgcaggaacaataactactgatgataaagtctatatcactaaagacttattagaaactatcaaagatgcaggtgcagttaacattactattgacagtgagggagataagaacaaagtttatgctaagggtgacatgaccgcagccttaatgaacagtgacactttaaagtctgctgatctaagtcatttagatgttagtgaagccactgcaattagatctatgtttcaaaatgacaagaatcttgaaaatgtaaacatcgctggctggaatatgggtcaattcagtgacgtgtcacaaatgtttagtggcgctgaaaagcttgtgaaagttgatctaagcgatactgtatacaaaaatgtggtaaacgcttggaacttttttgcacataataatgccttaactgatgttgatctaacaaatgcccgcaacattactagagaaatagttaatggatacgttcaagcaataaagaaccaaatgcaactgccattgatttaactactacaactttgaattccaatgtaactaatctgaaacttttattttctagtattccaaatgtaaaaagtattaacttaagtggttgggatacaagtcgtgttactaatatttatgcaacatttggtcatgataaaagtcttgaatctgtaaatattagtggttggaatttatctaatgctaaatcgattgctagtttgttcgatggcgatagtaatttatccaatattgacctaagcaatgtaaactttggtaataatattggtgataatggtgattccttcggccatgttggtaataaattaagtaacgtaaatttgactaatgctaaaggaattcccgaagcagtattgagagcatggggtcaagcagcgaaaaataccaaggctactgagctttcaatgagtacatttactgtttcaaccgacagttgatttagactttaatcttcacggtcaaaaacctggcatcgattcaagcaatataaaggttagagacgaaatagcagtagtaaagtaaataaatgtgatagaggattggacttatatttaattgctgtaagttcaaccctcttattttgattaaatctttgatacaatagacatgattaaataaatagggtgtgatctaaattctaaaatctaaacggcatttcatgtttctaggagttgcaggaattatctattattcttggctcttaatcgttctatttatcgcctttattttgggctatgaagggaacaaagcaattagtatacctggaatagtagttggtatcattttcttacttttagcagtttatacttggtccttttcttacttgcaaaagggtggagacaaaatattactcaagttgccatatcgttcaaaagtaaaaatcaatcaaatgactttgctttcaagttggcgtaattttcaagtttatcaactaaaaagtgattaccaaagctattctgttttaatgatgtctagaaagaagaataagcaataatgaaatcagatattgaaatcgcacaagaaaccaaagaattacctattaatgaaatagccgctaaggtaggcttgaaagaggaagacttagaaccttatggtcatgataaggctaagattacttggcaagccattaacaggactcgtgctagtaaaaagttaggtaaattagtattagtaacgtcaatttctcctactcccgctggggaaggtaagtcaacgattacaattggcttgggggatgcaattcacaatcagttgcaccagaatacgatgatcgccttgcgtgaaccttcgatgggacctgtttttggattaaaaggcggtgctacaggtggtgggaaagcacaaatcatccctatggaagatatcaacctacacttcacaggagatatgcatgctttaactgccgcaattgacacacttgcagctttagttgataactacatctaccaagacaatagcctaaatcttgatcctgaccgaattttacttaagcgtgggcttgatgttaatgaccgtgctttaagaaaaatcacggttggtcaaggctccaagtttaatggtgttgaacatcaagctagttttgccattactgtagccaacgaattgatggcgattctctgcttggcaactgatattaacgatttaaagagtagaatcggtgacatgctagttggttacactaaggatgatgaaccggtttatgttaaacagttaggattccaaggtgcaattgctgcactattgtctaatgcgctgaagcctaacttagtacagaccttggaacacacaccagcattagtgcacggggggccttttgctaatatcgcgcatggagccaattccgtcattgcgacaaacttggctttgcatttaagcgactatgtattaactgaggccggctttggtagtgatcttggtgggcaaaagttcatggactttgtctcaagacatctggacaagacgcccgatgctgcagtagttgtagcaactgttcgtgcattgaagtatcaagctttaggctcaactgatcacttagatgaagaaaacctagatgctttaaaaaaaggttttaaaaacctcgagcgtcatatgaacaacatgcgttcatacaatgtgccggtcatcgtgttaatcaatcgttttgcttcagatactgaccaagaacttgctttgcttaaacaattaattgaagaacaaggtattaatgctgaagtagttacttatcatggcgaaggttctaagggtggtgtagaagccgctcaagctgttgttgatttggctaactctggcaaggcagatttaactccaacttatgcagatgatgacgatgttaaagacaagattgagaaagtcgctaccaagatttatcatgcagctggagttgaatatagtgacaaggctgaaaagcaaattgcggaattaagaaagttaggtaaggcccaattaccagtaattattgccaagacccaatattcatttagcgacaacaagaacgaattgggtgctccaactgactttaagcttcatgtgaaagggattagtttaaaaaatggtgcgcattttatcgtggttaccacaggtcatgtgctagatatgccaggtttgcctaagcatcctgcggccctagatatcgatgttgataacaatggtaaaattagcggattattctaaaaagatatgcagtttttatatttaattatttcattagttgtggttcttgccgatcaaggacttaagaattatattgttgcccattatgctgtgggagaagtacaccagattattcctgggcttctttcctttaattatttgcaaaataatggtgcggcctggaacattttaactggtcaaatgtggcttttttacattatcagtattattgccattagtgtttgcttgtattttctttttaacaaaaagtacaagaataccttgtttgatgtgggtttagccctcatcttaggtggaattgttggtaattttattgatcgtttgcatttaaaatatgtagttgatatgcttcagcttgattttgttcacttcaacatttttaatattgcggattccgcaattactgttggagtaatccttgtgttcatttacttaatttttattgaaggtaaggaagaacaacatgactaaagaatattcacttgaagtaaaaaacgaaaagggacgtttagataagtttgtttcagaacaaattcctgatctatctcgaactagagttaaagaactggttaaagaccaaaatatcctagttaatggcaaagtcgaaaaagtatcttataagattcaggcgggagataaaatcgaagttaatattccagcggttaaaccgttagatgttatacccgaaaatattccacttgatatcgtgtatgaagacgatgatgtcattgtagttaacaagcctcaaggtatggtagtgcatcccgcaccaggtcatccagatcatactttagtaaatgcgttgttatatcacaccaaggccttagcacaatcaccagaaggatttcgtcctggaattgtccaccggattgataaagatacatctggtttattaatgatcgctaagaccgccaaggctcgtgaatcattagaagatcaattggctcataagactaacaaacgtctttattgggcaattgttcatggtaattttgcggaagaaaatggggtaattgatgcaccaattggtcgcaatccatatgaccgcaagaaaatggcggtagttgaaacaggcaaaaaagctattactcacttcaaggtgcttgagcagttcaaggattatagcttaattgagtgtcagcttgaaactggaagaacccatcaaattagagttcatcttgactatattggacatccggttgcaggagacccattatacggtccacgtaaaaccttgaaaggtcatggtcaatttttgcatgctaaagtattaggatttaaacatccaagtactggcgaatggctagagtttagtgtagaaccaccacaaatttttcaagaaacgttggctcaactagaacaaacaagtaagtgataatatgaaacggtatttgattttagaagatggcagttcatttccaggtgaaggaattggtgccagtattatttcaaccggtgaattagcaattcaaacggctaattttggctaccaagaagcattaacagatcctactaatgctggtaaaattttagtctttacttcaccaatgattggtaataacggtattaatgccattgattatgaaagtattgatcccgtagttaaagggattattgctaacgatattgcattaaatatttcagatagtgaaaattttgaagatttaagttcttttttgaaagaaaagaacatccctgcaattttcaaagttgacactcgtgctttagttcatcgcttaatggaagaaggtacaattaaggcttcgatcatggatactaatgacgagcatgcctttgatcagattaaagcactagttttacctaaaaataaatctgcgactgtttcaactaagaatgcatatgcatcccctaatgttggacgaactgtagctgtgctagatcttgggctaaagcactcaatgctgcgtgctttatctttacgaaaagtaaatacgacagttttaccatacagtgccagtccgattgatattgaaaacttacgtcctgaaggaatgattatttcaaatgggccaggaaaaccagaagaagtaattaatcagctaacgccagttttagatcatttttatggtaagtatccaattttaggaatcggattaggttttttaactttgagcgattatctcggctttgaactggttcaattaccacaagaatttgatggtattaattatccagtgattgaacaaaatagtaatgctatctggcaaacagcgatgaatattgaccaactagtgttgcctgatagtgtgaagatgaatatgaatcgtgaatactttgatctacacagtgaactgatggcgggcttctggaacagtaaggacaaattgatcgccactgcttttaatcctgaaggagcaccaggcactaatgatgcagatgaaatttttgattattttttacagatgatggggtagttatatgccattagaaaacgatttagataaagttttaattatcggatcaggccctactttaatcggtagtgtagcagaaatggatcttatggcaacagaagcaattgatgctttgacagaagaaggcattcaagttgtgctagtcaatcctaatccagctacaatttcaactgataaaaaacttggtgtaacagtctatcttgaaccgatgactctcgacttcctgaaaagaattctacggatggaagagccagatgcaattatgacagcttatggttcaactaatggtttaaaggttgcacataagttattacaagatggcgttttagaacaaatgggaattcagttactaacattgaattcgcgtgctctacaaatggggaatcaacagaaaaagacagagttgcttactaagctacatattgataccgggcaatcttgggaacttaatcagagtattcaggataatttagataatgcgctagaaagcattaacgacaaagtcacttttcccgtattagttactaagtacaaccgttttgtacacaacgaacatttgcaatttgcaaatcctaccgatttaatcagttactttaaagaagaaaagcaaaatgataattttacatggaagaattatcgcttaactgaagacttatctagttgggaagaagtaattgttgacgtaatccgtgataaggatggcaatttagcttttatcaattttgcgggatctattgaagctgtaggtattaattcaggtgactctgcagttgtgatgccatcattaaccctaaacaatgatcatattcaagagttaagaataaccgttagaaaaatcatgtctaatcttgatctcattggatttgctagttttcattttgcgattaaacaccatggaactcaaattcgatctaagcttttgacgattcgtccgcgtttgacgcgaagttctgtttgggctcaaagaattggaatgtatgatgtgggatatgtcgttagcaaagttgctatcggttatcgactgaatgagattaccgatcctctatctggacttaatgcctcaattgaacccaccttagatgcagtagcaattaaaatgccatattggtcatttgctgaatccggctataaccactatttgctaggaagtcgcatgcaagcaagtggagaagcaatgggtgtaggccgtaattttgaaactgcttttctgaaaggcttagatgcaactattaatttagaattgggttggcatgcttttataaaagaaaaagaaaaatccactgcagatattttgaatgatttggcacatcctgatgaattgcatttagttaaattattagccgcaattgatcaagatattccatattctgaattacaaaaagtaacacatttgcatccggtttattatcagaaattgcttcacattgtaagacttggcaaaaagttattacaagagaaggagcagccttcgcgtgatttgctgcaagaagctaaagtctatggattctttaacccattattagctaagattttacaaaaatcagttactgaagttcgctctttgattaataaaattgacttgcagccatcatatttgaagatcgacggctcagcaggtatatataaacctaatgtttgtgcttactacagtgcatatgatgttcaaaatgaagcacaagctttaaatgctgaaaaaaagatcttgattttgggcatgttgccgcttcaagtttcggttactagcgagtttgactatatgattgctcacgcggccgatactttacataagtatggctatgttactgtgcttctatcaaataatgacgaatcgatttcatcaaggtataagaatattgaccgagtttattttgattccattacagttgaaaatattctaactgttgctaaaagagaaaatatttctgatgtattagttcaattttctggcaaaagaatcagtgcattgagtaaagagttggaaaaatgtggtttgcacgttattgggcaaaaggcaaacgacgatccgcgggataagattactactttgcttgatcaacaatctactaccttaaagcgggtcccggcattaaataaaacaactgatacagaccaggttttcgcttttgcttctaaatatggttttccacttttaattggtggtatgaataaagaaaacaagcaaaaatctgcagttgtttatgatgttcctgcaatagagaaatatttagcagaaaatcaacttgatcaaataactatttctcgctttattgagggacacaaatatgaggtaacggctatctctgatggtaccaatgtaactttgcccggtataattgaacatctagagcaaacaggttcgcatgcctctgattcaattgcagtgattcagccgcaaaatttaaccgaagagcagcaaaaaaagattgagcaagagtcaattaaattaattaagcagctgaaaacaaaaggtatttttaatctgcactatttattcgttgataatgacctatatctattgcaaattaaaccatatgcaggtcataatgtagcatttttatcaaaatcactagataaggatatcactacttgtgctacagaagctttaattggcaaaaatttagcagagctaggatatcctaatggtctatggcaaaacagcgattttattcatattaaaatgccagtattttcatttcttaattattcaagtggtaatactttcgattcaaatatgaaatcctcaggttctgtaatgggtcgagatactcaactagctaaggctttatacaaaggatatgaagcaagtgatttacatattccaagttatggaacaatctttatttcagtcagagatgaagacaagaatcgcgtgacccaactagctcgccgatttgatcgcttgggtttcaaattaattgcgaccgaaggaacagctaatatgtttgcggaagctgggattactactggagtagtggagaaggttcataaagaccctagaaatctactagataaaattcgtcaacataagatcgtcatggttgttaatattactaatttgtctgatgcagctagcgaagatgcatcgcgcatcagagatgaagcgctgaatacacatattcctgttttctcaagtatcgaaacagcggaattgattttagacgttctagaatcattggctttaactactcaacctatttaataagcaaaacaaaatgcaaagtcgatatgactttgcatttatgagaatcattgaactaactagttcgatgatttttatttttcaatttttttattcataatttccttttcttcaggagttacttcaattgaattttgtccagtgtagattacaaatcctggtttagcaccattaggctttttcacacgcttgtcttgcacataatcaacttgtacgtgagcggaatttttagccttagaaaagtaagctgcaatctcagccgcttctttaatatcttgatcagtaggctgatcatcgcgtaagatcacatgtgagcctggcatattcttaacatgaaaccagtaatcagatttattagcttttttaagagtaagccaatcgttttgatagttgtttttaccaaccaatacgtgtttaccagatgaaagtttaaattcatttaaattgcgttcaatgattttcttcctacgcttatttttcttttgtttacgtaaatatccttgattaatcaattcatctgtaatttgatcaatatcctgtggatccgcattgtcaatagctgtttgaattgaatcaaagtaacgaatatcatccttagcaatacgaagctgttcattaatgtgcttaatagaatcacgtaactttttgtaacgagtaaaatacttttgcgcattacgagcaggggagagagcaggatctaatttaatctctaatggagcattattttcgtaatagttaggtaatgaaactttagtcattccaggttttacttgagccaaatttgcatttaaaatttcgcctttaattctatagccctctgaattttcagcaagatctaattgcttctcaagttttttaactttcttagttagtttattttgctcattcttaactacacgttcaacttgtcctgcacgctgcttaacccaatcacgtgttgcctgatattcataaaattcatctaagccagcattcagatctggattagagctttctttctctaaatctaaatgatagggcaaataacaaaaaatcttacgcttatttctaggtgtttttaaaataaaagcacgcggattgtcaaactgattaaaaaaggtcttaaaagatgaataagtgtaatcgtcttcaagatagcctaataattcagttcgatcatctttatctaagccatccattttttgagcaatttcattaggctggttttcactacttaattgtttaaattcactttctgatagagtcaacccatttaatcctggttttagtgggggcaactcatattttgcttttggcagtaaaacacgcgctctattttcatcaggattaattcgcttaagtaaatcaataatgtgattgtcttcttgattataaaggatgacattactatgacgtcccattaattctacagaaagcatgagcttgacttgatcaccaagttcatttcgattactaaaatgaaagttgacaattcgacctaagccaacttgctcaatcgattgcaaaactgaaccttctaagtattttcttaaaaccatgacaaaaataggtgctttatcaggatttgcaatgttttgtttagtcaaatacattcttggatattgtgcattggccgaaattaaaaattgataattctttctatcttttctaaaaattaagactagatcttgatcaaatggttgataaatttttgataagcgaccacctaccagagtagggactaagtcttttaataaactatggataaataatccatcaaatgccataaatatcacctcaaagttcgtgtaatattatatcaatttttagtcagattctaaaatgattatatttataagttatagctaatcataattgaaacctgcaatacagtagtaaatgtttcacgcgaggtctgctatatcattaagttgtatattacaacataaaaagtgcattgtattatacaatattactgataaattagccttttggtattatcaaatgccatattaaatgataaaatacaagtatatagtaatctacattggagaaaaaggactatacgaatggatgtattattttttagtacgatcgcagatcaagtgaaaaaagaaataaatcacaaatgcggcttaaatatttcacaaactcgaattttgctattttttgatgaaaacaaaaatcaagcattagcgatggggaagctggcagaagcgcttaatatttcattatcaaccttaagtcgtcaattgcagcaaaagaagactatgagctttattaatatcactagatcggaaaaagattcaagcaagattgtgaatctaagtgaagctggcgtgactaaagctaaagaactaaaaaaaactctgactaagattgagaatttattatttgtctattttgacagagatgctgctaatttatttattaagcaattaaatcaagtcgctgatacttctatgaccctagaaaaaatggaatagggtgcgtgataggtgccttttatgctataatttttctatgctaaattagatatgggaagggttaataaattgaaaattgcattagttactgacagtactagtgtcttaactgatcaagaagttaaaaataatgatattaatgtagttcctattcctgtcatcgtaggtgataaggaatattcagaaggcgttaatatcacttccacccagctttttgagatggagagacaaggtgctgcttttcctaaaacttcacagcccagcatggggcaaatgatagaattatgtaataaattacacggagaaggctatgaagctattatcgctatcactttgtccagtggtatctcaggcttttatcaaaatatggtaaatatggcacataacaatcctgaatataatttatatccatacgattctaagatgacagttagattgcaaggctacttggtgttagctgccgcaagaatgataaaaaatggtatggaaccagaggctatcttaaagaagttagatgagatacgtaagacaattgatgaattctttgtagtagatgatcttaaaaacttaagtcgtggtggtcgtttaagcaatgccggtgcttttattgggacaatgcttcaaatcaagcctttgttaacttttaatgatgaaggaaaaatcgttgcttttgataagatcagatcattaaagcgtgctgtttctaaggtagaaaaattaactttagagaagacagcaaatttgccttataaagataagctacgcttgtttgtatttcactcaaatgatttaaagcaagcggagcaaattaagcaatttgttaatgaaaactttccagataagccagttgatgtagctgaatttagtccagtaatcgctacacacttaggagagaaatcaattgcaattgcatggatggttgatattgataagctcgaattaaaataagaacaaatagccatagaccatagtacaaactatggtcttttttgtttaccctttttacgataatagatttgtaattaaaaattacagttgagatactagtgctgaatgttatagtaaaattgcgagactgtaaaatagtttgtgtaaggatgaatgattccttaaatttatttctttaaacattagaaaaaggagttcctttctcgtatgattggtttgaacaaaaaaacacatacagaaagaagaactccttcatgaatgattttaccaaagattttgctcaagctctattcaatccagacaaaataaatgatttattgcgcaaagagctacaacaggctgttaataaattgctagaagctgaattgactgcctttctgggctatgatccctatgccagaaatggctggaatactggcaactctagaaatggtgcttatttccgcaaagttgatacgcaatttggcccaattgaagtgcaagtgcctcgggatcgcaacggtcaatttcatcagcacacgctgcctgactacaagcagcactcagatgtcttggaaagcatgattatcaagctttactccaagggcgtgaccaccagggaaatagccgatctaattgaaaagatgtatagcagccattacagtccagctcaggtatcaaatatttccaagcagatgattccaaaggttgaggcttaccacaaacgcaagctaagcgacaagtttttctgcgtctatttggatgcgacataccttcctttgcgccgagaaacgtttgagcgtgaagcagtatatattgccattggcattaaacctaatggacataaggaagtcattgactactgcattgctcctagtgagaacattgaagtctggacagatatgcttcaaaacatggagtccagaggcttgaagcaagttgaactctttctttctgatggtgttgttggcatgaaaacagccttggccaggacttatcctaaagctcattttcaacgctgcctggttcatgtcatgcgcaatatctgtgctaaagtccgggtggatgaccgcgaaaagatcatgaacgaattcaagcagatacatcaacagacaagccaaaaagaagctgcagctgtcttgcacaaattctatgccagatggaataaagcttatagcaatgtcatcaaaggtttgaaggaaattgagcccgatctgctggtcttttataactatcccaagcagatcagagcttcaatttattcgactaacatgattgaatcatttaacaatgtgatcaagcgcaaagctaagcctaaggcagagtttccaactgaacagtcgcttgatgcttttattggcattcaggcaatgagctacaatgaccgttatttcaatcgaaatcataaaggctttggtcaggttcaggacaccttagaatcctactttgattaaataaataattaaaaaatcaatttacgagaaagaactatttacacaaaagatttgacagtttcaaaattgctatagtaggcaatagtaatatggttatcataaaatataggaattaatttaataactgttttactatagtatatattttaatgttctttttatgttacaatcatttttaaatcaaattatagaaattcgaggaaatgcatatgtctgcaagcatacttattaagccattagttacaatcagcgttaaattaaacataaggaaattacatcaaattgaaaaatatcaacaataatcaaaacttaaactttactcaagttaaagatatcttagctcaacaggcaattactattgctgccaaagaacaattaagttccgtccaaccaagtagcaatttacataaagtagaacaactgcttaatgaaacagaagaagccgtgaagattttgaaattacggcagcacattccttttgccagttctgaggatatcgagcatttaattactaaagctgaaaaaggactaatcttaactcctgatgatctagaaaaagtagcagaatttttacgagtaaatcgcctactacaacgctttttagccagacatgagcagctagcaccattactcaatgcatatgtccaagacatgacgctattgccagacattgaagatgctatttatactactattgaacatggtcaagtacgcgatgaggcagatcgtgaactagcaaaaatgtgccgcgacttaaagaaatctgttactgaactcaaaactgcattaaatcattttttgactagtaaacctaatcaaaaaatgattagagacgcaatgatcgttgaaaaagagggctacgctaccattccaattaaagcaaactacaaaaatcaattgtcagggactattgtggctgtttctaatggtggacaaaccgtctactttcaacctgctaaggttgttcgtctaaatcagcaaataaccaatttaaaggcacaaatacgtaatctagaactagcaatcttaggtgctttaactgcaaaaatatacgacgtgaaggatgatattaagcgtaacattgaactaatcactttactagatatgatttttgctaggggaaagtttgcacaaaaatataattgtattaggcctaaaattaatcgtgaaaattctcttgttttacgtgcagtgcggcatcccttgatcattaatcctgttccgttaaccttagaattaacccaagaaaatagtgttctaatgattacaggaccaaatgctggtggtaaaaccgtcgcgcttaaaactactggcttgatgattttaatgaccgaactaggtctgtttttaccaagcgataaaccatgtgatattccattaatggatgacgtttttactttaataggtgatcaccaggacctagataattctctgagtactttttcagccgaaatgaaagatattgccatgattaccaaatatgctcaattccatagtttagtattattagatgaattagggacagggacagatccaaatgaaggaagcgcactcgctattggtattctacaagagttgtatttacgtggctgtttaatcatggccacaacacactacagctctattaaggattttgctaagcagcatgatggttttatcacagctgcaatggattttgacttaaaaaatctgcaacctacttataagttaaagataggaagtattggtaatagtcgagcactatggatcgccaaaaaatcaggtattccagaaaatgttttgcatcaagcagaagccatattagcgggcaataatttacctttatctttaaaaaaacgtttcgttcaccagcggaaaaacaaaagcaacctggttgttaaaaaagaatttcataaaggtgatattgtatatgctaccaatttaaaagaagaaggaatcttttataaatatcttcctacccaaaatgcagcaaagatatttgtgacaaaagaatttgtagaagtaccactcagacgtttacaattaagacgactagctaaagacttgtacccaaaaggatataacttagatttactctttgttaaagactggcaagattataagtttaatcgtgatctagatcgtggctccaaaaaagcttacaagaaattgaaacattaataaaaaacgagtttggaattgaatagccaaactcgtttttgcatttaatttgattaatcgtgatttttttttgagatctcattgagagccgcacgctgttttttctgatcaacatgagtatatagatcggtggctgaagtgcctttttgacctagctgttgtgctacaagcacttgatctttagttacttcatagagctcagaagcaaccgtatgacgtaacttatgtggggtaaggggatgaccaaaagctgcagaatacttattgatcattttttcaattgcattagttgtaattcgccgcgtttgaccatgccattgagttaaaaagaatgccacttgcttactatctgcatgatagcgttcattacgaatacctttatatcgcttgatataaggaagtgtccattctgcaattggtacactatctttttgtccgccttttctagttacatctagtacagcatccttaaggtttaaatcactcaaatcaacgccagcacattcagacacccgaatgccggtacctaagattaatgcagcaattgccatgtcacgttctttgttttgcttaaaaccaatctttgcttgcttattacaatggttaatatagtcctgatcaataaaagtcaaaaattcaaattttaacttaccagtgtacatgtggctttcaagtacatgagcccgataattaagtgtttgcgtatcatttaaagaattaattttaagcattacattccgttcaaaatatggctcaccatgattattgtcggcagtaatggttaaaaacttaaatagggagcgtaaagcattaattgagcgattaatcgtagtgggggagtttagtcggccttgcttattacgggtatgtcctaaataatcaatatacagcattatgtcattgcgacgtaagttggctaatgtatccgtagtaacatgagcattatctgaagcagaagagatattttcttgacgtagccaatcgaagaagcgtcgaatttcagttaagtactggtaagtagtagttaatgaatgattagtaccaagattaaattgcttaacaaaatcaggcaatttatttacttcaatttggatcaattctaggtatttagcagtttccatatctactccttttgcgaactaatgtttatattatatcatacaaatacgttaatcataaaaaaatcacctattctcaggaataggtgataaaaaacagtctaatttaaaattactgcgctcattcgaacgtgaatatctatagtactaacgtagaaaaatgattgcaactaaatttaacttagataatcatgtcactataactagaataccagcaacgcttatagaaaactcttagcattctaattatagcaacagtgattgctcgtcagtaagtaagggcaaattacatttagtaattcaaacattacttacaaacatatgttgtttgtatggtacaacacttttcaatcgtttattttatgctctttattgctaatgttcaagtaaaatataacattttttataaagaatcgaaaaaagcttattttccttgtttagtcgtattttttggctaaaaattgtacaatagatgaaaatacattatgtgagatgaggaaaaagtatgacagaagaaattagtgtaaacttccaagctaaaaaccctagtggtatcaaattactgaatcgtctatatgatggtcacttagtgttaaacgacattggcgttcgtttagatgaacaacttaataatgaagatgaagaattgactgtaccaactcaagcagatgtagataacttgagtgagacttttggtaaaactgtcacagttttcagtgatattgccgatgcatatggggatgtaaataattttgcgaaaaactttggtggtaccactaagatttttgctcaaaagttaattactgaactagtagatttcaataatggtattgcggacattggagattccgaaggcggtttagaaaactacgataacgataagcttaatgactggattaatcaagtaatgagcgacatcgttgaaactaatgaagcatttaatgcattaattgatgataaataataaaaagtgtcagtccttaaaatgaggattgacactttttatagttaattgctttttaaactggacattggataaactgtgtaatcagcacggtaaacaaatagacgatgaccatcaatcacaaattgagttgcattcttcatatcactcttatgaattgagacgtgatttccaataaagacagcaatcggcattcctaattggcttctaatcattactactcttgagctaccattccaatcgtttttaaaattctgatacattgtatttaacagaggaacagaacgattttgatcgtcgatcttaacttttttgttaaatgcatcctcgtagtttttcagtccttcataggcaatcatagtagaaccaacgtgaatcattcgattattgccatagtcaacatcaattacgctagaatgttcagtgccattactacttttctgtgacatctttttatcagtatgaatattaactgacttagctttgatctggtcgatcttttgtccattagaatcatacgttgatactgttaagggcaatgccccaatcttagagcgcatagataattcccagttttgaaaatcactacaaccagtcagagaaagcaataatactcccagacctaagaataaagctaacttctttttaaatttcatccttatcttatcctcgtttctatataatgccttaattttaacatggataaaaaagggatgcagataaataaattggaaatgatttgtcagttcatttacgttttagggatgcatcaaaaaagcagcaaatatttgctgctaaaaataaattagaacttgtctgctttgacgtaagcatttttaccaattcgatagtaagcttcattattgatgtaatgtttagggccataagtcttgatcggtgaaccggattttttagtagaccattttgtattaatggtgccatcatttttatacactttagcatcagctttaaagacgcgtgaattgcctagtacgttacttgccatcacatacttgtcttcaccgacacgaatcattgatttgcctttaattctcaccttattgtcataataagcaatagagctgtaagcattataaaaatcatttgtccggttgctatttttgtcataaacatatgacttgtacataactgtagctgttttcttggtattggaagccttaggagcctgtgaaactgccgcgttacctgcgattgataatggcaagactgtaatattgccatcagtattcattccgcgccaattatctgtgaactgccagattgcgacaccatccattgaagggaagtatttaaagttgggttggtctactcggcctgaaatcgcatatgcggctacccagagtgaattaggatacttgttcacgatagatggagtattaatattgttttgcaaaacggaagaactagcatagagaagtggttgatagccagccgccttaatttgatccataaaggcaataatagccttagctgtcacatttttaccattagtaatgatattgccctgaccagtttcataatcgcaggctaagtatgagccagctggtaatcccaacgccttagcagaagaaattgcgtattgcgcttcgcgcttagcggccgatgaacttgaactaaaagttgcaaaatgataagccatcggcatcatatcattagcaatagcagatttaatctgattggctgccttagggttgcgataactggttccctcactaactttaacgattgcaaattgagaaccagccttggcatgagcagttaaatctgcgctttggtagctggcaacatcaattccaagggctttagcaacaactgatgttgatgaagcttgcacaatgctctctgagtcagagaaacgagtcatttgagataaaagtgtgacacctgcattcgttaacatagttgcacatgctaatttaataattgatttccttttaaacaatttatgtcctccatacttagtggagagaatcttatctatatctctcacataatttatactttatagactacagatatagttctcaaaaggcaatagatgagatcatttattaatatatcagtaatcaaaccgaaaaaaattgaaatcaaattgagatatacaatagacaaaaaataaagaattagtcgtggcaagaaatatgccccaaatctaaagaaaagtataagacagtcaaataatatattttaaaagtgacaagaaatagttcattcgcttaaaataaagaaactgtcaaatcttttgtgtaaatagatctttctcgtaaatagatctttctcgtaaattgattttttaattatttatttaatcaaagtaggattctaaggtgtcctgaacctgaccaaagcctttatgatttcgattgaaataacggtcattgtagctcattgcctgaatgccaataaaagcatcaagcgactgttcagttggaaactctgccttaggcttagctttgcgcttgatcacattgttaaatgattcaatcatgttagtcgaataaattgaagctctgatctgcttgggatagttataaaagaccagcagatctggttctatgtctttcaagcttctgataacatggctgtaaaccttgccccatttggtatagaagtcatgcaggacagctgtggcttcttctttgtttgtctgttgatgcacctgtttgaattcgttcatgatcttttcacgatcgtcgacgcgtactttagcgcagatattgcgcatgacatgaaccaaacagcgttgaaaatgagctttaggataagtcctggccaaggctgttttcatgccaacaacaccatcagaaagaaaaagctcaacttgctttaagcctcgggatttcatgttttgaagcatatctgtccagacttcaatgttctcgctaggcgcaatgcagtagtcaatgacctccttgtgcccattaggcttgatgccaatggcaatatagactgcttcacgctcaaatgtttctcggcgcaaaggaaggtatgtcgcatccaaatagacgcagaaaaacttgtcgcttagcttgcgtttgtggtaagcctcaacctttggaatcatctgcttggaaatatttgatacctgagctggactgtaatggctgccatacatcttttcaattagatcggctatttccctggtggtcacgcccttggagtaaagcttgataatcatgctttccaagatatccgagtgctgcttgtagtcaggcagcgtgtgctgatgaaattgaccgttgcgatcccggggcacttgcacttcaattgggccaaattgcgtatcaactttgcggaaataagcaccatttctagagttgccagtattccagccatttctggcatagggatcatagcccagaaaggcagtcaattcagcttctaacaagttattaacagcctgttgtagctctttgcgcaataaatcatttattttgtctggattgaatagagcttgagcaaaatctttggtaaaatcattcatgaaggagttcttctttctgtatgtgttttttgttcaaaccaatcatacgagaaaggaactcctttttctaatgtttaaagaaataaatttaaggaatcattcatccttacacaaactattttacagtctcaaaataaagatagttaaagaaagcgctttgtttaatcagaaatgtgataagatattttgcaagaaagcaaatgtgatcaaaatgctacattggatttgggtattaattgttggtggagtaatcggcttaattgcaggtgctttaactggacatggtaagtcaatgaactggattgctaatattttagcaggattggttggatcttcactaggccaagcccttttaggggaatggggaccgaaggttgcggacatggcaattgtaccgtcaattttaggtgcagttatcttggtaatcgtcgttgccttcattatgaataaaattagacctgcaacagattgagtttattcagatttttattctagctagataagcaaagagcctgattggacgaattatgtctgatttcggctcttttttcgtcttccctggtcagcagaggaggggagatagaggtataataatgaattaaaatgttgcttgtttgtataaagattgagtaaccacgataaattaattcattaaaaagaaatcttagagtgattctcagcattttttgaagattgaaactttatttagatgtcttattcatgtaaaaacacagatttaagtagcgacttgagtcatgagtttagtagaattatcatttttaccgcttgattatttatttaagaaatttcaatatgtgtattattgcagcaaatcttaaaaatagggaataagaataaatataaaagcacttaataccgatttgtatgtagcaaaaagagcaaagaatttataaaatatttttttacgaatttaaaatgaaatacaaaacgttaaaacaataaaaataacaaaagcacaaatttaccaaaattaggcttttgcgagataggtttatctagcgatcattaaaatttttgttttaaagaaagctatagcataaaaataaaaaatggctttatagatataaaggcaaaactagcaaatattactcaactattttcattgtttttaattagaattactttaccataattgtttcaaaatacttctctttgaaggttgttttattgattattgtcagcatattattcaattcagacttttagccataaaatatacagataactaatcatctaaaaaattatttcaagaatatctaggataccattgatttactcttagccataaaagtaattttatctagcttgattaacttgatgaaaaactataattccaaccatcaataaaaccattacttttaaaaactggttcatacaaatgaacaactaactattaaactataaactattgatcaaaataaatgaacttggtcatagaattgcgatctcagcatgtaaaaatttattgagagttgattttcttatcatagtcagagtaaatgaagtaaaaacaaaaattaaaaaagcaaaattcatttttgaaaaaataaataacctgaattcggaaactgtcaaatcttttgtgtaaatagatctttctcgtaaattgattttttaattatttatttaatcaaagtaggattctaaggtgtcctgaacctgaccaaagcctttatgatttcgattgaaataacggtcattgtagctcattgcctgaatgccaataaaagcatcaagcgactgttcagttggaaactctgccttaggcttagctttgcgcttgatcacattgttaaatgattcaatcatgttagtcgaataaattgaagctctgatctgcttgggatagttataaaagaccagcagatctggttctatgtctttcaagcttctgataacatggctgtaaaccttgccccatttggtatagaagtcatgcaggacagctgtggcttcttctttgtttgtctgttgatgcacctgtttgaattcgttcatgatcttttcacgatcgtcgacgcgtactttagcgcagatattgcgcatgacatgaaccaaacagcgttgaaaatgagctttaggataagtcctggccaaggctgttttcatgccaacaacaccatcagaaagaaaaagctcaacttgctttaagcctcgggatttcatgttttgaagcatatctgtccagacttcaatgttctcgctaggcgcaatgcagtagtcaatgacctccttgtgcccattaggcttgatgccaatgggcaatatagactgcttcacgctcaaatgtttctcggcgcaaaggaaggtatgtcgcatccaaatagacgcagaaaaacttgtcgcttagcttgcgtttgtggtaagcctcaacctttggaatcatctgcttggaaatatttgatacctgagctggactgtaatggctgccatacatcttttcaattagatcggctatttccctggtggtcacgcccttggagtaaagcttgataatcatgctttccaagatatccgagtgctgcttgtagccaggcagcgtgtgctgatgaaattgaccgttgcgatcccgaggcacttgcacttcaattgggccaaattgcgtatcaactttgcggaaataagcaccatttctagagttgccagtattccagccatttctggcatagggatcatagcccagaaaggcagtcaattcagcttctagcaagttattaacagcctgttgtagctctttgcgcaataaatcatttattttgtctggattgaatagagcttgagcaaaatctttggtaaaatcattcatgaaggagttcttctttctgtatgtgtttttttgttcaaaccaatcatacgagaaaggaactcctttttctaatgtttaaagaaataaatttaaggaatcattcatccttacacaaactattttacagtctctgaattcgagttaacaaatccaaaataagacttatttgctgaaacaattaaattaattatgacttctattattaaattgattgtttttcaatctgactttacataatattaattatacgcacacttataaaattattatttttcagattggtcgctttcttctcactcacaacctcttcaaaaaaacacttgccaattatgacaagtgcttttaaaatcattttgaaaaatcaatttttttatttcgtctcaatgcaatgatataaactaaattaatcgtcgttaaaaaaatgactgcaatccaaatagtttttaataccaataatttttgcagtaaagctgaaattattgctccaactgcaaatgcaattgttaacatcatataattaacggcagctgtatgtttacttttgtcttcaccaaaaaaaaatgcactccatgcaacaaccgatttttttaaatttccagttgtaaatgcattgttataacccatgccttcaattttgctgaaagatgcgttttgaatagccaatccaaacgcaatagcaggcacaatataataattaggaacacttttaggcaaaaagcccactacaatacaaatcgctaaaattggaaataagcaaaatactctccaatagtgacttttcacatatttatgaaaaagtcctactaatagcaatcctaaagaaaaagcaataaacgtactagctcgattaatcattccaggaacattatgatcagctaatgctgaactaaaaaagataacgtttcctgtttgtccagcggaaagcgtatgtcctctctggatatatgtatatgcatcaataaatcccccacaaaaagttaacgcacacgctaattgtcgtgactctgcaggccgattactatttaaaacctcttttaaactcatcaaatccccaatctatttttatatccttgtatacattataagcttaaaaacttaataattagtatatttttttagcttttatttcatttctattttaacaataaaagtattcaatttaagactatactataaactgtgagactgtaaaatagtttgtgtaaggatgaatgattccttaaatttatttctttaaacattagaaaaaggagttcctttctcgtatgattggtttgaacaaaaaaacacatacagaaagaagaactccttcatgaatgattttaccaaagattttgctcaagctctattcaatccagacaaaataaatgatttattgcgcaaagagctacaacaggctgttaataacttgttagaagctgaattgactgcctttctgggctatgatccctatgccagaaatggctggaatactggcaactctagaaatggtgcttatttccgcaaagttgatacgcaatttggcccaattgaagtgcaagtgccccgggatcgcaacggtcaatttcatcagcacacgctgcctgactacaagcagcactcggatatcttggaaagcatgattatcaagctttactccaagggcgtgaccaccagggaaatagccgatctaattgaaaagatgtatggcagccattacagtccagctcaggtatcaaatatttccaagcagatgattccaaaggttgaggcttaccacaaacgcaagctaagcgacaagtttttctgcgtctatttggatgcgacataccttcctttgcgccgagaaacatttgagcgtgaagcagtctatattgccattggcatcaagcctaatgggcacaaggaggtcattgactactgcattgcacctagcgagaacattgaagtctggacagatatgcttcaaaacatgaaatcccgaggcttaaagcaagttgagctttttctttctgatggtgttgttggcatgaaaacagccttagccaggacttatcctaaagctcattttcaacgctgtttggttcatgtcatgcgcaatatctgcgctaaagtacgcgtcgacgatcgtgaaaagatcatgaacgaattcaaacaggtgcatcaacagacaaacaaagaagaagccacagctgtcctgcatgacttctataccaaatggggcaaggtttacagccatgttatcagaagcttgaaagacatagaaccagatctgctggtcttttataactatcccaagcagatcagagcttcaatttattcgactaacatgattgaatcatttaacaatgtgatcaagcgcaaagctaagcctaaggcagagtttccaactgaacagtcgcttgatgcttttattggcattcaggcaatgagctacaatgaccgttatttcaatcgaaatcataaaggctttggtcaggttcaggacaccttagaatcctactttgattaaataaataattaaaaaatcaatttacgagaaagaactatttacacaaaagatttgacagtttctaaactgtagtgcctaatagcactgattacgctaaaaatgtacatttataaacaaatataatttcttattatttaatataagtgtatgttgagaatattaaaatagtctattcattttttacataattttatataggctataatagactataagttacttgaaaggatcgaatgcttgtgaatattaatttaggagaagaaatttctcgtagaagacgtgaacagaaactaacacaggaagatttggctgagctaagtgatctttctgtaaattttatttcacgtgtggaaaggactaaggaccaaaacattagtattcagaagcttgattctattgccaaagctttgaatactactacacccgatatcattaacaatgcctatcgtgctaaaaaaatcaagcctgaaaaaattcatgataacaatacacccgttttcatgaaaaaagttattaacgaattaagaaaattaccagaacctaaggctgaacgcgtatgtaagtctttgatcacccttctaaaagaaatgaataattaacaaaaacgtgctgtttattccgaaaaaacagcacgtttttgttagtcatcaaactttgatccttggacttggatcgaatcaatagttatatcttctagtggtttatccattttatcttttttcgacttagcaattttatcaactacatccatgcctgtaattacttgtccaaagaccgtatgacgaccgtcaagccatggagttccgccttgcttataagcatgaataatttcctttggatagcctgcgggttccatctgttttatgtaacgcttaggcatattcttgttttgaacgataaaaaattgactaccattagtgttagggcctgaattagccatcgataatgctccgcgaatattaaaaagttctcgtgaaagttcatcttcaaatggatgcccccaaatgctttcaccaccagtgacatttccttcaggatctccaccttgaatcataaaatcgctaattacgcggtgaaaaatagtaccatcataatagcctttttgagctaaacgaataaaattttcaaccgtcattggggcttgttctggaaaaagttgaatttttatttcaccttgattggttttcaatacagctgttggtccctgttgattttctaaatttaattgtgggtatttcaatatttttctcctaaaatcagttttaatttttaggtaaaaaataagaggcggttaaccctacctcctattttttacatcattacttttaagcattaaaagcatcagtaagaggtggaacaacctgcttcttacgtgatactacaccaggtaattcaacttctgaatcactaagttgcttattaaatgctttttcgaataatgacttagtctcatcagagccaacaactaaagcttctgaatctgagtcaagaatgttagtaattaaaagcataaacatatcatagccattatccttagatgaagcatccattgcctttaaaaaggcttccttacgttctaacgcttcaggtaagtcaacaacattgatttgtgcaacacggacgttgtgaccatttaattcaaagctcttggcatctaaatcaatcaattcttcttctgacttgtcactgatgttagtaccagccttaagcattgctaagccgtattccttgtaatctacgccagcaatcttagccaatgcttctacagcctttttatccttatctgtagtagttggtgatttaagaagtaaagtatctgaaataatagctgaaagcattaaaccagcgtagttttctggaatttcaatgccaaattcattgaacattctccaaacaatggttgaagtacagcctacaggttctgcacggtaatataatggatcagcggtattaaaattcattattctatggtgatccacaacatgagtaaccttaactttgtcaatatctgaaacactttgttgtggttcattgtggtcaaccaacataacagatttaacttctggagcagcttctttaattacacgaggtgctttaaagcagaattttttaagagcatatgcagtttcatcattaggctcacccaaggcaacggcttcagtgttgtaacctaacttgttttgcaaatatgaaaatgcaatagcagtgccaattgcatcagtatctggattttggtgtccaaaaacaaattctttttccattaaataaattgcctctttttctaattattttatttaatttcttcacttaatagtttactaaaattatggttcctatccaagttattgtctaagaaaatctgtaattccgttagtaatttcttcatcctaggaacatctaattttcctctacgataaacacaagcagtcgtaaactcaggcatatttttaatataaacaggagtcaaattaatctcatccttatgcgcctcatagtaagtctgatctacataagtatcaagatcagtattttctgcaattttgatcatttccttagtagatgcaattttaaacggagtaacgagatcaatctttttactaaagttaagtcgcattaatcttgataagtagtaattctccggatatgcaacccactttctgttgccaaaacgagtaacagaatatgtccctcctgcttccacattatccttgtgagtcagtacaacaatatgctcagggcaaatatcacgatgattgtattgatgacggaaattagctcctgttttattagtagtatctggcatatacataatcgccatatcaatcatattggaatcaagtctgtgccatagctctttgcggtcaaagtaatcaacagtaaaagttacttctggatactttttattgaagtaacgtaaaaattggtagaaaagatcaacatgtacggactctagaataccaattgaaatattgcctttatctgactgggtatattcttgaatgtcactaataacaccattaatggtatttagcaactctatcgctgctgcttccatttctttaccagcttcggttaggtataacttcttccccatttgtccaaataatggagcaccaatagcgcgttccaatttttttacttgctgagttaaagccggttgggtaatacctaaaatttgtgcagcttgggtataattcatcgtctcaatcaattgtaaaaaataacgcaatgatttagccgataaaatagtatcacttttagacataacgattatctctttcctaaaatattattttacgataagccatgtcccataacactgctattatctatccaaaacaaaacagtgtcaaaacatatgtcttaacactgtttttaaagattaatatattgttttagttaaactcaaatcttaattttgactactaatgggtcttcccaattcaatacttacaggcgtcccatcaacagtagtatcaataacaaatgagccgttagaataacgatcgcctaatggataatccgtagttttaatatttacatgacggtcactagaagtagtgacatgtaacaaatgatcttgagcatatggcattagagcaacaattctatgcggtttattcttcaattcccgcagtactagtacccctcgcttggctctagaaactttattaactagtttaagtttgaattgcttaaatgccccacgttgagtaattagcccaacatgcattaaatcaacatacttagaatcaactaggacataatttacgatataatcgtcatctttcaagttagcagatttaacacctactgctttagctcctgaagttggtatctcgctaacatcatatctaattgcataggcgcgatgagtaaataatgtgatttccttatgattatctgatttgatcaaatctaccccaactacataactatccttgccctttaacttgatagctgtcattgcacgtgacttataagttctcgtcggctgtaagttagctaactccaattgtttgatataaccgtcattagtagccagaataaagttgcaatcagtattcaatttatcaaatacaaagacgcgaataatttgctcatcactgtctaatccaatttcttgtgataggtgttgtcctgtttctttccatttggtttcaattagttcatgtactggacgataaatgacattccccttattggtaaataaatacaagttagtcagggtagatagtgtgttttcataaactactttgtcaccatctggtaaaccattgtcatcatcattagttgactgatatgaacgtaaagatgaacgctttaaatagccatctcgactaattagtactctaacctgttcatcagcaactaaggctttttcatcaatttcaactttagcactttcttctgaaatttgagttcgacgtggattagcaaattctttcttgactgcatttaactctttaataatttctttttctaaagttgcacgatctgataataatttacggtatttttcggccaatttatttaacttgtcttgttcagcaattaattcattaacatccgtattagttaaacgataaagttgtaaagaaacaattgcttcagcttgtttttcagtaaatttattatacttagctattaaattcttcttagcatcggctttatttttagaagcgcggatggttttaattacttgatccaaaatatccatggcatgaatcaagccctgaataatctctaatctagcttctgccttatctaagtcaaatttcgtacgtttagttacaacgtcttcttcatgttctaaataagaagctaaaattcgttttagcccaacttgaacaggagtcatgtgatcaatagcgaccatgttgaagttataagatacttgtaagtcagtatttttaaataaataatttaaaatattctgcgcatcagcatcttttttcaattcaatcacaattgacaaaccatggcggtcagtttcatcacgaacttctgcgattccatcaatttctttattcagacggatttcatctatcttttttactaatagtgctttgttaacatcgaatggaatttccgtagcaacaatttcttgcctatgcccacgaatttcttgaatagtggttttggcacggacttgaattctaccacgtcctgtcttatatgcttccttaattcccttagtccccataacaatagcaccagttggaaagtcagggccttttacatatttcatcaaatcttcaagagaagcatcaggatgtttcaataaataaattgttgcatcaatcacttcacctaagttatgtggtggaatctctgtagcgtaaccagatgagatcccagttgatccattaactaataagttaggaaagcgtgcaggtaagactgtaggttcatactcagtatcgtcaaagttaagcaccatgtttacggtttgcttatcaatatcttgcaaaagcatattagagattttgcttaagcgggattccgtataacgcatagctgctgggccatcaccatccattgaaccattgttaccatgcatttcaactaacggttcgcgcatcttccagtcttgtgataagtgcactaaagccccatagattgagctgtcaccgtgagggtgaaagttacccatgatattaccgacagccttagcagcctttttaaatggtttatcataagtattactatcttgatacattgcataaaggatacgccgctgaactggctttaagccatctcgaatatcaggcaaagcacgttcttgaataatatattttgaatatcgtccaaaacgttcacccattacttgttcaagtggcatttctcgaattcgttcttttgtggccattaaatttaaaaccttcttttattcatcttcggattctagaattgagccgtcttcgcccattctgaatttaacattttcttcaatccactttcttcttgcggctactttatcacccattaaggtagtaactcgtctctcagcaagagcagcatcgtcaattttaactctgattaacattctcgattgaggatccatagtagtagcccatagctgttccgcgttcatttcacctaaacctttgaatcgctgcagcgaatagccacgtcccattttcttttcatcatcagctagttcttcatcagtccatgcatattgaacttgcgtctttttgcctcgacctttttgtaagcgataaagcggtggcagagcaatataaacttttccgtgttcaatcatcggccgcatataacgataaaagaatgttaatagcaagatctgaatgtgagcaccatcatcgtcggcgtcagtcatgataatgactttatcataattagagtcatcaacattaaactcggttcctacaccagcaccaatggtataaatcatggtattaatttcttcgtttttaaagatatcctgcaattttgccttttgagtatttaatactttaccacgaagaggcaaaattgcttgaaatcttctgtctctaccttgcttagcagatccaccagctgaatcaccttcgaccaagaatagttcattctttttaggatttcgcgattgagctggcgttaatttaccagacaaaacttctttttttcgtctctttttaccattcctgctttcatcacgtgcctttttagcagcttcacgtgcatccctagccctttgagccttcttaactagttcctgagccagctcaccattttccattaaatagtaagacattttctcataaacaagtgaatctacagcagaacgtgcttgtggagtacctaatttacccttagtctgtccttcaaattcaagtaattcttcagggattttaacagataaaaccgcgctaagcccttcacgataatcagaaccatcaatatttttatcttttttacctagtagaccctgctttttagcataatcgttaaatgcacgtgtaaatccactacgagcacctgactcatgggtaccaccatcaccagttctaacattgttaacaaatgaaactaaattttctgaatatccatcactatattgacctgaaaattcaatttccatgccatcttgcttgccttcaaaataaaagacatcactaattgtgcctttaccttcgtttaaatacttaacaaatgatttaattccatcatcatactgaaaaacatcatgatgttctggctcacgctcatctgttaagaaaaatttaacccctttaagtagaaaagcatattcacgaattctctcctgaattgtctcatacttatacttcgtggttgaaaagatagtctcatctggcttaaacgtaatggtagtccctgttggctcttttgtctttcctacacactttaatgtacctaccggatgcccaccatctttaaattcttcttcataagctttaccatcgcgaacgactctaaccttcatataacttgaaagtgcattaacaacggatgaacctacgccatgcaacccgcctgaagttttataattttgttcagtaaacttaccaccagcatgtaatacagttaaaataacttcaattgtgggcttacccgatttgtgcattcctgtcggcataccacgcccaaagtctcttacagtaacactattatctgaatgaatgattacatcaatttctttaccaaaaccagccatggcttcgtcgacagagttatcgacgatttcatacactaattgattaagaccatgaatatcagttgaaccaatatacataccaggtcttttacgaacggcttctaggccatgtaaaatttgaattgaagaatcatcataagtattagcttttgccactaaaattcctccacttgttcattaatttaaccagcaccatatatttaaaagataatctttgctaaaatagcgatagattaataggagtgttgttaaatatgtttgcattaaaatttgcatcgttgtttattttagcatacttgattggatcattcccaacaggtgtgttagtgggtaatatcttttttcataaagatattaggaaatacggatctggaaatatcggaacgactaatacctttagagtattaggaccagctgctggaatcattgtctttatagtagattttctcaaaggaacttttgctacagtattaccaataatttttaaactaggaccacattatctttgcttgatttttggcttagctgcaattttaggccacgcttttcctgtctttttaaagttcaaaggaggcaaggcagtagcaacttccgctggatttttactaggatataatgtccattttttcttgatctgtgcgttaatcttcttccctatcttatttattacaagtatggtttcattaactagtttgatctcagtagttctaatctttattgcttcattctttttccacgatcttgccttgagcattatcagtggattgctcgtaatcttaatttactggagtcaccgaagcaatattattcgaatcgaacatcaccaagagaatctggttccattcggtctagtgtattggtataaaaagaaacatactaactcaaactaaaattataaaaccagcaagcatttagcttgttggtttttgtttacctaaatattatacttttgcaaacaatagttcgcaagtacaaacaaatatttttattttattataatgatctatttatttcaaaatcttaattaaatcgtctttactcattgttgcatcagcaatctgatcattttgcaaaattatatcagctaattctgctttcttttgctgtaaagcaatgattctctcttcaatactgtcttctgtaaccatcttataaatcttaacagaatgcttttgaccaattctatgagctcgatccgtcgcctgtttttctgcagccaagttccaccaaggatcataatgaattacaacatcagcaccagtcaagttaatgcctgttccgcctgcttttaatgaaatcaaaaagacccctggttgagccatttgattaaacttttgaacttgttcttgacgcttagttttaggtgttgatccagtaatagtaaataaaggtagtcttaatctggcaaggttttcatgcaaaatatctagcatagctgtgaactgtgaaaacaataaaattttatgtccatttgctagattattcttaatcaactcaattgtagcaattaatttattagacttgccgtgatagttttcataaagcaaatgaggatcacaacaaatttcacgtaatttagtaatctgagccaaaatttgaaaacgtgatctcttaaagtcttcatccccctgtccatttaattgagcgataatcttttgcgtctgcatattatacaaatcagcttgtttcttattcattttaacaggcacaatttcttcatctttgtcaggtaagtcacgtagcacatctttttttagacgccgcaagataaagggtattatcatattagctaattgatcttctgcttctttatcttgctctttaacaatcggtaattcatactttttcctaaagtcaggatataaacctaaaaaacctggcattaagtaatcaaaaatactccataactcgctcaatttattttcaatcggtgttcctgttagagccagtttatgatgcgctttaatgactttgactgtcttggcggtaactgattgctgattcttaatattttgtgcttcatcaattacttctacatcaaaaattagattttggtacgcttctagatctcgattaagcgattgatatgaactgattagcagattatactttttagcatctaaaagcaatctctctcgttcttttttagtgccatctaatagagccacattaaggctaggtgcgaactttttaacttctgcctgccaattatagataacagaagcaggcgcaacgattaagctaggtaactgattttgcattttttctttgcgagctaaaagaagactaataatctgcaaggttttacctaatcccatctcatcagcaagtagcccgccaaatttataattaacgatagtgcttagccaattaaaacctatcttctgatatggacgcaaaatattttgcaaactaactggtatttgattttgcttcaactgattcttagctaaatcattaatcagagtattaaaggattcattagttgagaaatgcagtgcattagcagctttcatttgcttagcaaaataaaaggcacgatatgctggtaaatgtaatttaccgtgaatgaaatccttaaaactaatacctaaatcatgcaaagtttgtgccaattgttcaattgtcggttgttctgccttagctagcattccattttttaaaacaaaatattttcgcttttcttggtaggctttcaaagccgcttgaatgtcttcccagctcatcttttgatcagcaagatcgatatctaataattcattagtcaggttgatacctactccaacatccaaattaatctttattccctttaaaagtgatctaaagttagctgtaatttgtacttcgcctaatcgtttcaactcattgataccatcatctagaaaagcttgtacgacatccgagtcttcattggataaaacataccgcccatgctgataatcactaaaatatgtattaatgtgcttccatgctgcggtctctttttcaacatcgcgtcggtcctcttcagtatatccttgatttaactcgtattgtgcatccccatactgtactcgagccacacataaaatactgcctacacgataatctaatttaaacaaaaaatgggcctctggtggcaaaatagctttcaattcatcagtaccagacactaatataaactttgtttgctcaaatttaggcaaaatattatgtgcaaacttagcaacggtctttttactaaattgcatttcagcaccaggctgcaatcctaaattatgcaaagaagcaggcgtaagacctatatatttgatccatacatctttgtaatagccataatacgcatgactcccagtaattatagtagaaactggaagatcctctacactaactaaagcagatgacttttgagtttcaattttaatgtttaaatctagttgatcagttgtatatcctataggctgctcatttgagtacaactttacgccttgataaagtaaatcattaacttcatcggccacagagttctctagtgtaatgcgaccaacctgactactgtaattataataaaattcttcgtttagattacgagcatctataattttttcaataaaagataaccagtgttgactatcaatatccattttagcctgatttataggctcgttgaaaaacttacctagctttagagaagagctgtgtcgggatgcatctactagttgattaagatctttaactttataaagatgcttgttctttcctaatttaaacgtcaaactagggatgttattatacttatcaatacttgcccgcaaaataatcggctcatcattttgggtagaagcgtcactataaaattcaagtagatcttcagcggcctggttagttaaatcaaatggatcgtcatcaagatactcattaataaagtaaaacagagctaatattctaacactatctttttcaatacgggaaaaatcactatcaaatttaattgatataatttgccagcgagtaaattgcacagataatgtaattaactcattgtcctctgttactatctcccaaaaatattcatatttacgcatcttatcatcaaaatgccgacaactactaatcgaccagtgatcattaagttccagtgcctgatcataactttttttggtaaatttcatattgccaatcaaatttaaggggttaagtactgggcttttatgtgcaatcatttgcttaagatgttcagaaattaagtcagcaaaagggactttaacgttatgttcattttcttgttcgttttctactgcaagtaaagccgcaacctcgtgtttacagcgatgccctttattagcccatggacaattacagtctaactctgaagctcgaccatctaaacgaagacgaccagttacagtataagaacgacccattccgccttgaacttgagcggtaaagtgttcctgatcttgagctaattgaatattttcaaccatatcattgccataatatatttctccacgatcaaaaactcgttcaggaaataatctatgccatctagacatttacatcacgctctttcataattattactacttacactatcataattttttagttgttaataataaattgtcacaacatttttagtgagcattttattattaacgaaactgtcaaatcttttgtgtaaatagttctttctcgtaaattgattttttaattatttatttaatcaaagtaggattctaaggtgtcctgaacctgaccaaagcctttatgatttcgattgaaataacggtcattgtagctcattgcctgaatgccaataaaagcatcaagcgactgttcagttggaaactctgccttaggcttagctttgcgcttgatcacattgttaaatgattcaatcatgttagtcgaataaattgaagctctgatctgcttgggatagttataaaagaccagcagatctggttctatgtctttcaagcttctgataacatggctgtaaaccttgccccatttggtatagaagtcatgcaggacagctgtggcttcttctttgtttgtctgttgatgcacctgtttgaattcgttcatgatcttttcacgatcgtcgacgcgtactttagcgcagatattgcgcatgacatgaaccaaacagcgttgaaaatgagctttaggataagtcctggccaaggctgttttcatgccaacaacaccatcagaaagaaaaagctcaacttgctttaagcctcgggatttcatgttttgaagcatctctgtccagacttcaatgttctcgctaggcgcaatgcagtagtcaatgacctccttgtgcccattaggcttgatgccaatggcaatatagactgcttcacgctcaaatgtttctcggcgcaaaggaaggtatgtcgcatccaaatagacgcagaaaaacttgtcgcttagcttgcgtttgtggtaagcctcaacctttggaatcatctgcttggaaatatttgatacctgagctggactgtaatggctgctatacatcttttcaattagatcggctatttccctggtggtcacgcccttggagtaaagcttgataatcatgctttccaagacatctgagtgctgcttgtagtcaggcagcgtgtgctgatgaaattgaccgttgcgatcccgaggcacttgcacttcaattgggccaaattgcgtatcaactttgcggaaataagcaccatttctagagttgccagtattccagccatttctggcatagggatcatagcccagaaaggcagtcaattcagcttctagcaatttattaacagcctgttgtagctctttgcgcaataaatcatttattttgtctggattgaatagagcttgagcaaaatctttggtaaaatcattcatgaaggagttcttctttctgtatgtgtttttttgttcaaaccaatcatacgagaaaggaacccctttttctaatgtttaaagaaataaatttaaggaatcattcatccttacacaaactattttacagtctcttattaacaaatcatgcgatgatcttataataaaagtatagaaagtacagtattatcatatagacttatataagtatcagctaatgtaaataaaatacagaaaggaaataaaaatgactcggcaattaaaattgctgaagacttagattgctatacagaactactttctggaattacaagaaaatttcagcagtttagttatcgtaagctttatttatatgatattcaaaaaacaattcgtattttaaaaatctaccaggaatggcttttagctcaatcagatcaaaactttagcaagctttatgataaattttgggcacaatgtgaaatggatattacagccgtctctctactgcttgtgccaaacgtacatgataagaagcaggaaatagaacgcatagatcatttactcaatcaaattaatcaaattgggacatcatatttactaaatgacgttcaaagtaacgctgtaggttccgccatgaacaatgctatttatccggctaaccgagctggctagagcaaatttatcaaaatagtcaaagtgaaaataatattgaatacgatcataaactgcaaaatttcttaagtgttcattcagagccttatcctgatgcggatacattagttattttctttactaatactaaataaaagacattggccgtatttaccaatgtcttttatcatttttcgttttcattaattcttaaaggatataacctatcatcatgttctgcaggagcatcttcttcgagtaacaaatcatgattaaccaattctttctttagtcgtttcaccgtataagaattgcaatgcatgtcatccattagctcttgattagaataaataatatacatattaccgtcagcatctacccatccattggtttgtgaatcaatcattctcatcgtaagtatcatgtataggtatcatgcatcggggcttaacttcttatacttgggattatgaaaaaatgcttgtggtagcccattttgctgttccgggtagttttcgccctttttaaatttacgaatatttgtatacattttgacctcttcactttacatagctttttcctttacattaattataatgtatatttttattagatagtaataattggacttactagtaaattatgcaggccattaaattaatcagcaatattcgcacctaatgcatttttaaagtgagccattgcccattcatcgccatttgatgtaaaagtagcaacagcagaacgtggaattgtaatttcatagtctaaattatatgccgcaatcgctgtgtgcaatacacaaatatcagtacaaacaccagttagtgtcaggtcatgaatatggcgttcacgtaaataattatctagattagtattttgaaaagctgaataacgatttttatccattaataaaacatgatcattatctttgttttctaaataccatttacccgtttgaccatatacttcacggccagcagttccaataatattatgcggtggatataatttagtttcagggtgatatggatcattttttaagtgcgcgtccatcgggaaaatcacccaatctttattttgtagaaactgtttacacagttctgtaatacgttgatcaattgcttgagcaggctggccacaagtaagagctccatcatcagctacaaagtctttactatagtcgataactaataacgcttttgccattattttctcctttataaaataatatttaaaatatacataattaaattaattattgctaaaatcactattgatataatgaataccaaataaatccagacagtaatattaactaaaaacggtaataatgcagcgtgaaagcctagaaaagaaactaagagaagcataataaaggttataccaattaatcctaaaaaagcatatttgccactacttatatcagcctcgcttaaatcgaatccaccaaaacatagactgattactagcaataaagcaacaattgagtgccatattgaatcaaaattaagctgaaataattcaaaaatataaatccaactatgagttaagaaattccagttaagtgcattaccattacttaataactgagtagtaagctgattctgaaccaatgaaataggtgtattcaatgtacgcatgattatgtaaatcagcaaggtgcatcctaatacaggtgcaatgccaataaaagcattacccaccttttgataagtagatgtaggagaccaagtatgtttaacatagccaagtgacatatcattggtattactagggatgcgcaataaactaaccgcattaatatgatgaccaaaaattatagccataatcaaatgactaagttcatgaacaataattcctaatccgccaacaataatttgactattaaaaccaaatgtatttaccaatttttggttagcttcatggcttaattgtcgtaatgctaatacaaataaagccggaacgagtaacattaaaaaagtcccattaagggcataaagaatatgtttcatctctgatttaaatttgttttacatattgagtcaataatgttaatgccgcaaaaagctgatcaattacgccatcagttgcactgaaatcagttttaacaaactgaataacccaattatttttaattggaattaaacgaacaacttcatcttgaccataattaagccgtaaactattggctaaaatcacttcacgataacgatgtccatcacttcctagccactgtgttgtttgatcagtactttgcttaattaggctataagctttggatatttttcgcaacttattacgcagatcaaaccaggactttatttctactaactcactatttttaacatattcagataattgcatgccttcttgactttgcgcaattctttctaatgtagttaaggcaatcgccatagatttgagcgaatcaattgaaagttgcggcattaaaatttggattagccaattgtgactgaattcatcaggtggatacagtcgactaacttcaagattattttcaaaaaatacacgatatgtattcttacttaggctttcatattctttttcaccatcttgagtgcaatacgtcaaaatgacattatgtttaatttttcgaatggcaaaattatcgtctgatgaaaaaattgtactttcaaattctgtaaaatctgtcattaaattctatctttcgtctataattttatttatcgtgtttactaaaatatattgctctacgcttttttaaactagcaataaccttatcaatgtcttcatcagacattcccctgcgtttggcattgtttcgccattgtaattcactgattggagcacaactaacagtattcaaattcatccatatccagagcgataacaaactacctgcaagacctactagcacaaatgtaccagtaataaaagttaaagatcctacgaaatgtgatacgctccaaagccaaccgaacaaggttatgatatataaaataggcaaaatagctggacgatgattttttccatattcagcattcgggccaaagaaagtttgccaataacgaggtattgagcgattaattactaaatttgctaatgctaatagtaagcaaattagtacagaaacattagacttaattaataaaatactaatagctgacagaatgattacataaaatgtagcaaaattagtagaaaagaaaacccaacgtcgaaatttagcaccattgccaatgattattgcttgcttaggatttaatgttgtctggaaaaacattttatcagttgagacagtttttcgattaaagatatcaaagtgcatctaattctccttacaagcttaattttactacatttctagctatgacttaaatttcaaaaataaaagcggcttacatctcgtaagtcacttccgttaactaattttcaaaccaattccaatcatcgccaaccacgtcaactttagcatcatcggcagctgctgatctgattttttctgcttgagttgggcgttcaattgtgaagccattgttagaatctttttcaaccatgccttcaaattcaactacatcgcccctcttcaaatcaaggtctttgaaagttttcaagtaatgcagtgctaactgcttaacaattggattgccaccagcacctgcaatacgcaaatccttaaaaatagctaagcgatcgtttaatctatcaaaagtaccactaaatttatgacgcttaccatcgtcgtatggttcaagtttttcattgtaaatatctacagacatatgtacataatcttctttctacctctctaatataacattgattttgataaaataaagaggctagataaataaaaatcactctttaatccgattttaacgtatacttttaactgtaacttaggagagaaaatgagcatttattatcaatttggaattattataggtttggttctgttggctttcgccattcacatcgcaatgaaacaacataaaactacctttccattcaacattgtcaacttaggcattgcattcataatctcaacattagcaatttatattattgtagcctgtctaggagcaattcaaccgcaaaactggtaaaccaataatgcattatggaaatttttaatagctagttaatcataattgagaaaatctaaaaaagattttctcttttttattaaaatacaattttatttttttattaattgattaatcactctatcttgtgtaatttgatacaagtttagtgtgataaatgtatttcgttttttcatataaaaaaacaacctcagagaaattatatatcaaaaggagactgtaaaatagtttgtgtaaggatgaatgattccttaaatttatttctttaaacattagaaaaaggagttcctttctcgtatgattggtttgaacaaaaaaacacatacagaaagaagaactccttcatgaatgattttaccaaagattttgctcaagctctattcaatccagacaaaataaatgatttattgcgcaaagagctacaacaggctgttaataacttgttagaagctgaattgactgcctttctgggctatgatccctatgccagaaatggctggaatactggcaactctagaaatggtgcttatttccgcaaagttgatacgcaatttggcccaattgaagtgcaagtgcctcgggatcgcaacggtcaatttcatcagcacacgctgcctgactacaagcagcactcagatgtcttggaaagcatgattatcaagctttactccaagggcgtgaccaccagggaaatagccgatctaattgaaaagatgtatagcagccattacagtccagctcaggtatcaaatatttccaagcagatgattccaaaggttgaggcttaccacaaacgcaagctaagcgacaagtttttctgcgtctatttggatgcgacataccttcctttgcgccgagaaacatttgagcgtgaagcagtctatattgccattggcatcaagcctaatgggcacaaggaggtcattgactactgcattgcgcctagcgagaacattgaagtctggacagagatgcttcaaaacatgaaatcccgaggcttaaagcaagttgagctttttctttctgatggtgttgttggcatgaaaacagccttggccaggacttatcctaaagctcattttcaacgctgtttggttcatgtcatgcgcaatatctgcgctaaagtacgcgtcgacgatcgtgaaaagatcatgaacgaattcaaacaggtgcatcaacagacaaacaaagaagaagccacagctgtcctgcatgacttctataccaaatggggcaaggtttacagccatgttatcagaagcttgaaagacatagaaccagatctgctggtcttttataactatcccaagcagatcagagcttcaatttattcgactaacatgattgaatcatttaacaatgtgatcaagcgcaaagctaagcctaaggcagagtttccaactgaacagtcgcttgatgcttttattggcattcaggcaatgagctacaatgaccgttatttcaatcgaaatcataaaggctttggtcaggttcaggacaccttagaatcctactttgattaaataaataattaaaaaatcaatttacgagaaagatctatttacacaaaagatttgacagtttctataattttcacaatcttagtcattaaaaataacattattcagtttaaaaacctgaagtatatggactttttgataaaagctattatctatgcttgactttacttcacaaagataagacaatgactgtgcagtatatgaaagcggatacaatataaatggtatatctatttttgaaagcatggggaaaataatggatagtttattatttacaacatatgaccaaaataaaattaatgaattacaagataaacttaaccagcttagtcttcctatcaaagtagttggtttagctgaagtagattatgcaccacaaaagtcatattctgaggcaacatttttaagtaatgctagagctacagcacatcgtttagctgaatttaccaatttgcctacattatcagaaagctcaggtctaagtgttgattatctacttaactctttaggaatcttgccttaccaccataatggtcaagatgataaagctaaattattaggctatttaggtggagtttctagtgaaaaaaggacagctagctactacactacctttgtctttacttggccaggtcaagaaagcaatgatattgttagtgctggtagaatcagtggattaattgctaagtatccacatggtagcagtaactatggttacgatgctttattcgtagttccagaactaggaaaaacctttgcagaaatgaatctcaatgagagaaactcaatttcgcaccgcaataatacattaaataagttattgtgtgatttacccgattggtgggatgctcaaaaatctgctcaggcaattaatagaaactgtcaaatcttttgtgtaaatagatctttctcgtaaattgattttttaattatttatttaatcaaagtaggattctaaggtgtcctgaacctgaccaaagcctttatgatttcgattgaaataacggtcattgtagctcattgcctgaatgccaataaaagcatcaagcgactgttcagttggaaactctgccttaggcttagctttgcgcttgatcacattgttaaatgattcaatcatgttagtcgaataaattgaagctctgatctgcttgggatagttataaaagaccagcagatctggttctatgtctttcaagcttctgataacatggctgtaaaccttgccccatttggtatagaagtcatgcaggacagctgtggcttcttctttgtttgtctgttgatgcacctgtttgaattcgttcatgatcttttcacgatcgtcgacgcgtactttagcgcagatattgcgcatgacatgaaccaaacagcgttgaaaatgagctttaggataagtcctggccaaggctgttttcatgccaacaacaccatcagaaagaaaaagctcaacttgctttaagcctcgggatttcatgttttgaagcatctctgtccagacttcaatgttctcgctaggcgcaatgcagtagtcaatgacctccttgtgcccattaggcttgatgccaatggcaatatagactgcttcacgctcaaatgtttctcggcgcaaaggaaggtatgtcgcatccaaatagacgcagaaaaacttgtcgcttagcttgcgtttgtggtaagcctcaacctttggaatcatctgcttggaaatatttgatacctgagctggactgtaatggctgctatacatcttttcaattagatcggctatttccctggtggtcacgcccttggagtaaagcttgataatcatgctttccaagacatctgagtgctgcttgtagtcaggcagcgtgtgctgatgaaattgaccgttgcgatcccgaggcacttgcacttcaattgggccaaattgcgtatcaactttgcggaaataagcaccatttctagagttgccagtattccagccatttctggcatagggatcatagcccagaaaggcagtcaattcagcttctaacaagttattaacagcctgttgtagctctttgcgcaataaatcatttattttgtctggattgaatagagcttgagcaaaatctttggtaaaatcattcatgaaggagttcttctttctgtatgtgtttttttgttcaaaccaatcatacgagaaaggaactcctttttctaatgtttaaagaaataaatttaaggaatcattcatccttacacaaactattttacagtctcaattaataactagctcactttgaaaattaaactggttaaataatatctacttacttaattcaataacttcttaatactaataaataaatcctaaaaaaggtaggtcaaaattgacctacctttttgtttaagctttacataattaaaaatatttttataaatcttgatccgtcttggtcaaatcactacgatctgaaatccaaacatatagcggcaaattaatcttacctttttcatcgattgcatcaacgactttttcaatcaaaaattcttgccatttctctgcaggttgcatccctgggtgacccaattgtggtaccaaccatccatttgctaatggcttacctgtagtcaaatctacaatcatgccgacagtataattataaaaatcaaaactaccttcaactacaatccaattactactatttatcaattcagattgcagcttagttaacatttccggcggaatctttccttctgtaaccatcattctgcccttaattggaccatttttcttttcgaagtcttgcaaaacacctttcataaaaagcttttgccctaattgatcaaattttgtttcatcttttaacataatcatgtccgctttctttagaatcagtatccattatactaaaatttgtttagtatcgtatcttcacttgtaaattagagtgatcacttgtgtcgtacagcgtctttagatataaccgatactcaggatggtgcttaatcaaaacttgatattctttagaagcatggattttattcaactcgctagcctttatatgattatgaccattaaagaaatgatagttcatccagccaaacaaattccccatcgccctaactaactcgatgtcttcgtgatactgatttaattcactttgcatcatatccgcagaaatactaccaagctgtagatcttttaaatacttatgataatgaactaaagtataattttccttttcctcatccgttaaatatcttgtcatatcaaaattacgccgcacatatgtaatgtgccgtgaatgaactcgcactactccatagccttgatcattagaacaaaaacttgatgtaacgatctcagttgtaggcgtcatgtcttgtggtcccataatattttgagcatgaatatgaccagaaaaagctaatttcacgttgtaacgcgcacacaaacgtcgtagctcaacagcgtcatcaactacatagcccttgttaactgctggattatgtgcatataaattatgatgcataaataaaaccggacgtaactgatgttcctgcgcataacgaaattgtttttcaatccattttaattgtacttttccaatttcgccgtgagtgtgcggtgcttctgttgtctcttcttttccataaatatttgaatccgctaaaactaaaagatattgcggattcagttggacactgtaagccaatgaattatcgtcttcatctaaggcctcacgatatgatttatcaaagatcgagcgccaaaacattgggctaatttcaccagcatagaactgttttttaccacgaaattctctagcccacccatcaaaaatgtcgtgatttccaggtaaaactaacactttagtttctttcaacggcttaaaaatttgagcaaatttctcagcagaaactcgttcaccgttaaatgtcacatcaccagttacaataattgcggcaggcttttttctttgtgccattcgcataaaagcagaaagggctatttcttgataatacaaatccttaccttgactagttttttgcatgcgtgaaaaggcttgtccttcatcatgtaaactatctgcgattaggtgcgtatctgagatcacccaaaattctgtgttaagctcttttgtaatcatttcttaccttctgttagcccaatactgatagaaatcaacccgcaaatttccgttaaatagtttgcgcttcttagtagcctttgcaccaaaacatttttcaaagttaggatctgcagttaagtaatactgactgaacgaactaagcggtctaagtacttctcccatttggcgatacagctcttctgccgactcacgatccttcaatcgcttaccataaggtggggtcgcaattataattccattttctagatcagtagtaaagtctttaactgcgatttgtttaaagcgaatatcttgcaatacacctgcattgtgagcatttaatttagctacttcaagaacagactgatcaatatcactagcccaaatcggtgcttcaagcggcttaacttcactcttagcctttgccaatacttcattatgtagtttagggttaaaccattcaaaaccatcaaaggcaaatttacgccaggttcctggtgctatatttttagcaattaatgctgcctcaatagctaaagttcctgaaccagtcataggatcaattaaggggtgagtaccattatatggagttagttttaatagcccggccgcaaagttttctttcataggggctccaccatgctctactcgatagccacgtttaaacaaactagcgcctgtagtatctagcgaaattcgagctacatttttataaatatgaatatctaagggatattcattaccagtttctggcaaaaagccacgacgatggtactggtcaaccatcttattaacaattgccttttttacaattgactgtacatctggttcagagtgcaatttggattttacagctctaccttgaacaggaaacttagcgtcaacaggcaataattcggcccaatcaaaatcataaatctcattaaataaggtatcaaaatctgttgctctaaactcttttagcaaaattttaattcggtcagctgttctcagccaaagattagttctaactatatcttcttgaccacccttaaaaaagacacgaccattttcaacacgggtcttataccccatagactgtaattctttattaacgacactttcaaaaccagcgcccatagttgcgtaaagttggtattctttcattgttactctttcattttcaaaataaaaaagagctggacctaaaagcccaactctgcctgtgtgaatttctataagccacgttttgttccaataatctctggcaaagattaccttgagtagtcatctatctttactgcttaaagcaataatccgacctttagttcatttccttaggccgaaactcccccaccaaatttgggtttcacactcgcagggtttacctcgttccaccaaagtcatttctgaccttgcttcgtcactgtggcacttttcaggatagtaatgcatgtccgaagatttagcactttttccgccgtgaagactaacgtcctcctccagcttgttaggctgaatacgatcactacaaacatcgcagtctgtgtgtgcgtggactttcctcagctaacataagctagccgcgcctactcaaaattcacactgttagtcattatagcaaaaattaatgctttaatccataaacgtgttgttctagattataaacttttctttccaaagttgaaatccgttgaataatagccatattagtcgaaatttcaccttgagtatcatctgcatcttctgcaaacttcacaggcgcacttcttctatgcgttggcatataagtcttaaccttttcttcttcagcctcaactgttttctttgctttttgcttttcatccattaattgacgttggagcgtaccgatctgaccatacaaatcttcgataatttgttgaaaagtagtataatcagaaattacttcatctaagtatgcatcaacttcatcgggatcatatccctttactttacttttgaattgtttctttaatatatcttgtcctgataattttatatcatttaaatttgccatcttactgacaactcctttacattccaccctattttagcaaaaacaacgctgactgaaaataaagaaacagactttaataaaattttaaccatattattcagaaaaatgatttatttgatgattttcttggtattcttcagctgcatcttgtaaatcataaaaatcaattaaatctaatggatattctttagtttcctggtatttttggattaaattataatcatatttaggtttacctgggtgctctgaatcatagatcatcaatgctcgatcagtatgctgaatcataaaattttgataattacgtaattgaagtggactttgataaggggtattagaagttgaagcaaaaaagtccactttttccttcaaatttaagaatttagctttgttactatcattccatcgattagcaaattcttcatatggaatcattattgatgttcttaccggatatttttctcctaattcaagtccaacctcagctgtccactgttcgacaccgaggttagctccagtaataatccagtccaattgcccatcatccagtagacttgtcagataattttttagggcatatttaatgacagttatcttgggatcacgatcgccaaaaacatttaattcatagctgcgatagccagtcacccataaacgctgcatttgtttaagcccccctttatgttcaaaaatgtagtctttattgctataatgctaacaggagtgaggacaatggtcaaatatcctagcggtagtttagccgcatttagaaaacctgtaactaaaaaagatgaacatccagttcaccgatcatatcatcataaaaaaggtgttaacttttctgatcgtgggatgacacttgagcaacaaatcaatgaatctaataaatattatttaatggaagaaattgcagttgttcataaaaagccaaccccaattcaaattgttaaagttgattatcccaaacgttctaaggcggtcattcgtgaagcttactttaggcaagcttcaacaactgactataatggtgtttataaaggatactatctcgattttgaggcaaaagaaacacggaataaaactaacttcccattaaaaaactttcatgaacaccaaatttttcacttggacgaatgcttaaaacaacaaggaatttgttttacaattattaggttcgctagcttagagcgctactttgttactccagctagttttgtaattcgagcttggcgaaaaaaagataaaagctcaatgactttaaaagaaattgaaaacaattcttttgaaatcaaaagtggctttcgtcctacactgccttatcttaaggcggtagataaattcattgcagataggaaaagataatcatggcagataataacaataatatgaaacgagaatcacgaagagactatcatggtcgaaggccaagtagtggccacttatggattagaatcattaaatggatctttttgctgatatttttaatagtaatctctggaatcgggctttttgctttttatgccaaagatgctcctaacattagtcaggaccaattgcagagtggtaaatcttcaagtctatatactaataatggtaagtttttactatcacttagttctgaaaaaagaatttatgttaaaaataaagacattcctcagcaattaaaagatgctgtagtttcagtagaagacaaacgtttttacaaagataagttaggcgttgacccaattagaattattggttctatgttaactaatgccaaaagtaatagtattgctgcaggtggttctactataacccagcagttagttaagctaacggtcttctctactgctgcttctcaacgtactctgaagagaaaagctcaagaagcttggttagctatgaaagtccaacatgaattcagtaaagaccaaatcttagaattttatattaataaagtctttatgaactatggaaattatggcatgggtactgcttctaactactactatggtaagccactaagtaagttagatttggcacaaactgcattgattgcagggatgccgaatgcacctgttgcatatgatccatatctttatccgcaaaaggccaaataccggcgtgatattgttttaaagactatgctacaaaatgacaaaattactaaagctgagtacaatcaagcagttgctgaaccaattagtaagggacttaaatcacatcgaaataataacgagtctaagattagaaaaattgatgatccatacattaaagaggtaatttctgaagttaagagcaaaggctttgatccatatcacgataatttaaagattactattaatatcgatcaaaaagctcaaaacaagctgtacgagttagctaacaacggttctgtaccttttacaaacaataaaatgcaaattggtgcaactgtagttgatccaaacaatggtcatgttgttgcaatcttaggtggacgtcacttaccttctgttcaattaggattagaccgggctgttcaaactggacgctctaccggttcgtcaattaagccagtacttgactatgcacctgctattcaatacttgaattggtcaacagcaaaaatgattgatgacagtaagtatgtttatcctggtaccaatatccaattatatgactgggacaacaaatacgacgggatgatgactatgcgacatgcattggagcagtcacgtaatgttccagctattaaaactcttgctgaagttggagtaaaacgggcttcagcttttgctcgccgaatgggcgttaatgtttcaccaaaatctggtttatcagtagcaattggcgctaatgcgtctagtttacaaatgactggtgcttatagtgcttttgccaccatgggcgtataccacaagccgcaatttgtttctaagattgaaacaccagatggattaaccagaaattatgattcaaatggtgtacgtgtaatgaagaaatcaactgcctacatgattaccgatatgcttaaaggcgtaatcaaacgaggctctggtactaatgcaaaaattgcagatctttatcaagctggtaaaaccggtactgttaaatactctgatgaagatctagctaagtacccaagctataattcaactccaaaagattcatggttcgttggttataccagatcatatgttatgggtgtttggactggttacgataatttaaaggacggtactatttctggaataggtcaacaatctgcacagctaatgtataagagtatgatgacctacctaatgaacaataagcctaacctagactggaaacagcctagctcagttgtaagagcgaaaattgtaaataactctaatcctccagaattagcaactggtggcggcacttggcaattatttgttcgaggccataccccagccggaattggtaatagtgcagcaagttatgatgaagacgatgaagaaactgatacttcaagcgataatactggaactactccttcatcttctagaactgcagttactcaatcatcatcaagtcgtgaaaatggctcatcatctcaatccaatagcagtcagcgagcctcttcctctcaaagaagaacacaatcttcttcaacacaacaaagttcatcaacgagaaaacctgaggaagaatcacatgaacgtaatgatgattcggataatgactaggcaataattaaatatatttattaacagatagcgttttgttatctgtttttattttggccgaaacgtagttgaggcctgaaattataaaatcaaaatttagtaacaacagattatataaaattattcaataaaaaaagccgaatttatttcggctttacttttcggaatttaaataagaatacggatcgcctttagctcgagctggcattgtataacgaccaaatagaatcatcgcatggtgcgtttttatccattcacttttaggtaaaattgcttctaatcgcttctctacttcatgtggagtagctttgtcatctacaatatggaactttttagaaatccgtgacacatgagtatcaacagcaatagctggcacaccatagccttcagccaaaacaacgttagcagttttctctcccacccctggtaaggtcatcaataactttttatccttaggaacctgtccattatatttatcgaccaaaatttgcgcagtggcctttaaatgtttagcttttgaacgaaatagaccaatagtttttatctcatgctcaatctcttcaattggagcttttgctaatacttctggggttgggaacattttactaaaactaggcataacacgattaaccatcttatcagtcgtttgtgcgctcaacataaccgcacaaagtaaatgaaagttagtatcccattgcaattcaccttgtgcgtcaggatacaatgctaaaatttttttcaaaactctacgtgcttcttcatcactcaataaatcttctgtcatttttatcgattccttttcaaaaatctctcaacttcatcagttgttttcagactatgcctttgccaattaagtaaaacacgatcaatatactttaaagaatatgcctgagacaatacagcctctcgcaaagcaagttcaattaattcaggagcatagtgatccacacttaaccattgcgcaatctcttctcgttcaattggactcagatagcgaccaaattcaacttctacttttcgtgacaaataatttaacggattattttctaaattattagcaactgaaacagttttatcttttttcttatctttgatcaagacgttttgatcaatatagtgatcaagtgcattatacaacttattgagactatatttattaccaattttatcctgactatcagtcatttgttcaatagttaaataatttcgttcaattagccgctgaataagattacccacatcactaaccgataaattagtattagcagcaatcttttcattagatggaaaactctcacctcgttggctaaatgcttccaattggattatcaaaattagttcagcatcactaatgcctaattgagggtagtaagcgatcaatccattttgtaaggttgtaaagcctaatgcccgataatcattaaattccaaaataatttcctttcaaaaacaaaagttgaactaataactagtccaactttgtgtatcaatatttaattattaaccaaattaaggttgcattctgttaatcaatcttgggaatggaattgcttcacgaatgtggtcaaggtgacaaacccaagcaatagtacgttcaaagcccataccgaaacctgagtgaggaactccaccaaatttacgtaagtcaaggtaccattggtagtcttctaaattcaaaccagcgtcaagaatttgttgcttaaggatttcgtaatttccttcacgttctgagccaccaaaaatttcaccataaccttctggtgcaattacatcagcacataagtattccttaggattatcaggattcttcttcatatagaatggcttaattgaggttggatagttgacaatgaagactggacgatcatattgttctgaaatatagccttcatctggagcaccaaagtcatcgccccacttaatatcacgtccagcatctcgaagcattttaattgcatcatcgtatggaagacgaacgaagttaccttcagtagttgggcgaagtttttcaggatctctaccaagaatcttaagttcatattcattattttctagaacttgcttcaccatgtaggcaagatatctttcttgaatatctaacgattcatcttgatgcatccaagccatttctggttccatcatccagaattcagtcatgtgacgacgaccctttgattcttctgctctaaaagttggaccaaaagtaaagatcttaccataagccatagcaccggcttcaccatacaattgacctgattgtgaaagatatgcatcgtggtcaaagtattctacatggaataattgagtagtaccttctggagctgaatgcataaagataggtgcatcaaatttgataaagccttctttttcaaagaaatctacagtagccttaaacatggtatttctaatttgcataatagcaaatggtttctttgatcttaaccataagtggcggtgatcaagtaagaagtcaacaccatgttccttattaccaattgggtaaccttcattgtttgaaaccacttttaaatcagtgatttgaatttcataaccaaagtgtgaacgtgcgtcttcatgaacagtaccagtaatgtaaaaacttgcttcttgtctaagtgacttagcagcatcaaatacttcttctgatacatcattcttacgtactaccccttggaaaaatgcagtaccatcacgtaattgcaaaaagataatctttccgcttgatcgtttatctgttaaccaaacatgcatcttgacttcttcatcaacatgtttagaagaatctttaattgaaatcaattctgtcataaaatcctatccaccttttcatcaattatacagtttccataataccaaagtttctataaattatcgacttctgagatatcatttccatttttgaattcatataaagtataacctagattgccgttttgttttttgtaggccacttcccaaacgacctcacccttataccaaccaagattaatattatttattgtagcatccgtatggatagatttaaacttatttttaatcttagattcagtgattcctttggccgcaggatatagatatgcctttttagaatttggcaaataaataaagtaatattgttttcccttattattggtgcctgctatagcatagctgctagtgccgcgatctaaatgataatagttttgaatctttctaattggtgttttactagtagccaattgcgtaactttttgatcattgccccgacttctagatccagcataataaaagatagcaatgctggctagaaaggcaactattatcaaaccaattacccaactcacaaacttgattgtttgtcttgtatcatcttgtaacataattatttattttctaatttcttttttaattcttctctagtaaccttttcaactttgacaggaatcgtttgaaggaactcttgaccataatctttagtccataatcttgggtctaaaattacaaattgaccatgatcctgttctcctctaattaaacggcccattccttgtctaaaacgaatgacagctcttggtaaactatctttagtaaaagaatcgattccctgatcttccaatttcttctgccttaaacgaacttcaggttgatcaggagattcaaacgggatttttgacgcaaaaacagtatcaatcccacaatcatgaaaatcaattccctcccaaaaactatcagcaccaattataattgactttttagcaattacaaacctcttagcaattcggttattggaaccagacaatccctgggctaagatttcaaaatcttttagctgtggctcattcataatcatggtaaaaacagttttaattttttctaaattagtcatcaaaacaagtacatggtgcttatcttgaatgtcactaagtaaaatttgtgcaatagtcttttcaaattcttcactatcagggctaggcatattattaactgccagtacctgtaaatgcttttttatattaaaagtacttttaccaatatattcaaccggatgtaattctgttaaagctaactggttgattgcatattcaaaatttcgattactggttaaagtagcactgacgaaggcaatatggtcaaaacgactatagatttgttttaatacttcaccagcatcaagcattaaccagtctaaattggtacttagtggatcatcaagattagtaatcatcaaaataaagccatcttgctctaaacctttttgatcagaaagcaaatcagccaattgatagcccttttcagagtaataatctaggcgatcaatttgttccgtaatctcattgactaatacctcaacattagccagcatgcgttcttgttcattatataattcaaataaaacctgattagttaagtccctaacctcttctaatttttgttggaacttaggtaaaatcgctttaaacttgctatttccgccaaataaactttttccttgaaaactaagttctagattaccattagctaaaactgtccgattaacagcattatctctttgaaaataaagttgcttttgtaattcattaattaactgaattaattccaaaattttaggatctattttctttagtaaaaggttcagctgcacatcatcattaaattgcgcttcaacactttcatctgagaaataaagcaaattacggagatgacttaaaactccccacaaagcttcaaaacgcaaagaatcattacgcgaacttacgacattgtctgtgaaacgatgagcttcatcaatgactaaatacggattctgaccccaaattgtatccatatagtggttagccaaataagcatgattagtcaccaatatatccgcttcttcttgtcgtttacgcgctaaattccaaaaatcgacccctgcaaaacggctacctactcttgcatcccctggatgttgaatctgtgcaaagagtggtgcattatagttagttaaatttaattcatctaaatcaccagttttagtcttagtcagccaaaccagtatctgcatctgtaatatcaaggtttgcttattcggtgtaccttgaaaaatcgtctgtacaaatccgtcaaggtcaaggtaacgactacttgacttaactacttctgcagtcaaatccaacttaatcaccttaaataactgcggaatttcatgttcaatcacttgttcttgcaacactttagttggtgtagctacaactaattttctaccagaataaagctgataagcataagcaaaaagataagaaaaagttttcccagtcccgttaggtgcttcaattagcatcgcccttttatctggatcattaataaactgatgcaaatgattaattaggtcgacttgagctctacgaaagtgtaaatgatctttaaatagcttttgtttctctgagtcagtctttgggaatttagcattcccaccatgtgcttcagaattatcattttgtttttgcagaataatattacgcacttgcatatattctttacctaaaggccgtttttcttgacgtaaattatctgcaatcgttgtaatcacccaagaggtatcccgaataagcccatgagataatgaactgagggtattcagtgtagcttgaggtagactttctaatttattaaaaatttcaagcaataaaactgcagtcccataagcatcagaatctgccttatgtggatctaaatgtttaatccccaattgtgttgtcaaatcactcaacttataagatggaaaagtcggaaaagcaatcttagccagttctacagtatcaattgctttatttgtaagtgcctcataaccatgttgcactagttcataattcaaaaaaggcaaatcaaagtcaacattatgagctacgaaaacagtattttgcaaaattttagtaattttgggtgcataataatcaaaatctctttgttttgctacatcttgatcatgaattccggttaaattaacaactgattgtggtatttcacgatgcggattgatcaaaaatgaataagttttaactaccttgagatttttaataatagcacacccaaactgaataatatgatgcccattctcacgttgcgttcctgtagtctctagatcaactacagcaaatgtatctttagtaaaactttttgccataatttcctccttcctctatttcacttcaaccgcttgtttagcatcaagcagaattaaatattttccaataacttttttttgactaaattcattgatagcttgttcatatagtctaagctgacctgtatatttttctttaatcaattcaattgattcagataaatgcgattgatcaacgtggtcagttttgtagtcaaacaaaataataccatcatttttgacaaaatagccatcaattgtaccatgaaccaaaattttggcattaggatctgaaaagtttttaaacaaagttttagcggagattaaactagaaaaatctatttctcgctttaaattctctggcttttgccaaaattcctcggcaaaattgctatgaacaaaccactcaatttggtctttctttaaactagaaacaatttctggattcagtttcttttgcttaatcaattcttgaatttctacttctagttgatcttcagcaccattgccttgataatcataatactgcaaaatcatgtgtgtagcagttccgatttctgcaccagtaaacttagtttgatacaagaaattaggtttagtatcaatcggttgtaaataacgattagtcgatgtcaataagtgggcattctctaattcggtctcgatcggatcgttgaatgctttttttatttcagataccgcttggtaagctgtagtttcactagcatctttaaacggataattaaattgataaagccgtttagtggtttgatttaaaaggttactttgcgttttatcattacttgtctccgctttctgataatcaggtagttcaccgttagcattttcataattaatatataaaaacgactgaatcttatccaacgaattagtaatatcagacattttcacagctaggtgtcgatctaaagccaacgcaggtcccataaaactcaatggactagtggaagataacttatctgctaatgataattgaccaatctgatttagttcagtcgaccattctttaactcgtttatccagattaggaacatcgccaaccaaaattaatttctgcttagcccgcgttaatgctacataaagaattcgcgcttcttcttctaataattgcctttttttagttacatttcccatcgctttaactaaagagtcaatccgataatgttcttcacggagcgtaattcctatactatctgagctaatcacatagttaccttttaaatcacgcatttgatatttatgctgcatccccacataaaacacgatcggaaattctagtcccttagaaccatgaatagtcattaatctgaccgcattaccagcttctttagttaataaaggctgtgccaagtccttctgactttgccgcatccgattaataaaattgataaattggtataatcccttgaaccctgcactctcatatgaagcagcacgttcatataaagcttctagattaactcgtcgctgttcaccattaggtagtgcggtcattatctctaataaatttgtcctagcataaatgctccaaatcaattcagaaatacgatgtgccgtggcaaacttgcgcaaatcagctagttgatttaaaaaatctttgattcgagtacttaattcatctcctacacctacataagaagtcaatgcactatagaaagtagagttcttactcttgatacgaattttagctaaatccttttcaccaaaattaaacaaaggcgaacgtaaaactgaaactaatggaatatcctgatcgggattatcaatgatctttaagtagttcatcataacagtcaattcaaaagtttgaaaataattcttcgcatcagttacaaataatggtatatcctgcttagcaaattcctgcattatttccaaattatcactacgacttctagtcaagatagcaatatcactgtaacgtaactctctcattcctgttttactatcaaagatttgtacacgctcttcttttagttgcttaatacgtgctaaaaccatttgaatttcagaaaaatctatctcattttcatcttcattactgctatttttcttttcatgaacaattacttcactagctttaggagtgttttcaggataatacttagcaccaaaaattaattgtccttctttttgatagtcaatcccgccaaaatctgaacttagcacacttttaaatacttgatttacaattttggtaaccggctcagtagagcggaaattatctgacaacagaattcttttggtttgtttattatcatcattggcaaaatcatggtattttttcaaaaataagcttggctctgcttgtctaaagccatagatcgactgctttacatcaccaaccatgaaaagcgtatttttatctttatttttgatttgctggatgatattttcttgcaaagcattaatatcctgatattcatcaatcaaaatctctttgaatttattttgataaaattcacgagccatttgagaattcgatgtatcttgactcaaaatctgataagccaattgttccatatcactatagtcaagcaaattttcactgcgcttcagcttattaaaccgatcaatcaaggctagctcggatttagcaattgcagcaacaatcttttggccgcgctgcatgactttaatttgttcttgttcatcaacagcaaaaaatgaagtaaaagtatcaaaaaccaaattttttgcttcatcttttaacttttgtaggtcttcataaaaatttagaacatcttcatcccatttacttgacttacgataattcgctgtaaaaacacacgaacgtaatagttttcgttgtttatcgtagtctgcatcattttctaaagcaaaaacaaaatgatctaaattttgtgcaaacaaggtaaaagcttccttagccttagctagctcttttgtttctattactggattttctaaataatcattaattttcccttgtaagtcgccaatactagtaagcaagtatggcttaatctgtttttgccacaaatcagattccacgatactgccattaaccacgtaaacatcaaccaatttttttaaccatgagcgatactcaggtttggccatggcaaaatcatacaaatccagcaacaagtcgcgcggactatccgcatctctatcccctgcaaagttatcataaaaatgcctaaaatttacgtctttcttttctagaaactccccttcaatttcacgtaatgcacgttcttttaacaatgcagcttgagtatcatcagttagaatactaaaacttggatctaagtttacagagtaataaaagcgatggattacttctagacaaaatgcatcaattgtagaaatattagcagtatccacttgatttagctgctcacgtaaatatctgcgattagatcccggctttgctaattcagctgataatgcctgtttaattctagttttcatttcttcagctgctgctttggtaaatgtaattactaataattcatcaacttgggttcccgaaagaatctcccttaaaacgcgctcaacaagaacagttgtcttaccactacccgcagaagcagaaaccagaatatcatgaccacgatcatcaattgcttgttgttgctctttagtaaattgagacaattttattgttcctttcctaatttctctttgattttaagaattaattcttttttattcagattgtttatttcatgatattgattttgacgcagcatcgcatcaaaaaagaagacatcacgataatcagaataagttaaggcattcttcgctttgccataacgatatggattaagttcaatttttccagataaaatttggcttgatgcttgtcgaataagatactcatcgtattctagcagtaattcaatttcttcctcactaaagttgcggtcacgtggcaagctaaagccacctctagccttagttttaaccccagtatacagttcagaagaatagctaggatgatcatcaagtaatggctcagcttctactaagatttctggatcattgctgattaagccagtatacatcagcttgggcttactatcagttgctccctttttcaaatttaaactactatcaattagtttattgctattcaaacgttctaattgtctagtaacagtttgataaaaagcacccaataatgaaagacgatcttttccagcaaaaaattgatcatttttagtcaaaacatccaaataagaaaccatctgtaaagcaattccgttataaaacatcccaagatcaaattttttagctgatgacttgtaatcaataacctgggctaaaacttgatccttatcattgaaattggccaaatcaacccggtccattttaccgcgcaaatcaactttatgttgacctgatatatctggcacttttaagcttaatcctttgattttttcacctaacccaaaacttaattcagaatacttagcccgtaacggggtttccttcaaggagcgccgccaattatgagctaccttagaagtagtatggtctagacacttgaaaagatattgattaaaaggatcattcattaattgagaatattttccttcatccttcatcacatttcgcaccgaattaagcatttgttccagttctatgctgcttaaatctgctaagtcggtatgctgcttgtttagttttttcactaaacggtcaaaagtctcgtgaaaatagtttccagcctgaataacatcaaattcattttcaaaccgtcgccgcagcttaagcccataattcaagaaatattcatatgaattttcataaaaagtttccagttgtgacacagatgaattcaagttttgaccatacaattgactagccaagtcctgaccaatattttctggctggttatcaaaatcacttgcttcaagcactgtcttcgttttttgaggtagttgctcctgtgtgatttttaataactcttgcacagcaagacctgaatttattgaattcatataggttaaatagcctaaacttgcatcagggttagtaatgaaagacaaaagatcctgcatcttttctggcaaatcatgttgaacaaattgctgagcaccataatcctttaaacgttgataataaattgaaggatcaagctcttcatttgaagcattaagtactggataagatacatataccctatcttgtgctaaagctagcgacaaaccaaactgataattttggtctaagttattaagctgttgactatcttctaagtaagattctgaattaaaactattttgtagctgattcaagttttcagtagttaaaaaacctggcattttctgaatttggggtaaattattagcagtagcgccaatgataaacacttgcttatagccgctagtttgtaccatccccatttcagaaaggtttaccgcatcaagtgttgaaggaatttgggaaaaatttgcttctcggaaagcgctaattaacatattaaagaattcatttaaatcaaaagtttcaggattaattgctaaatagtcttgcaacagctgcattaataaatcccataattgctctggttgctgcgcctgctgtaaatcaccggcttcattggcctcatcacgccatttttctaatcggtcggcaattccgttcttagttaagaactcaaaaaatatcgttaacgccttttgactatctttttcttgctctattattttgaaaaatgttgaaatcttatcaaccaagtagctgcgcaaacgatcgatcttagctacttcatcatccattttgtctaagcggatcacttcagcattcacaaaattatcaaagtgttttttccataaattatgattaataccatgagccagaacaaaattctctagttcatcaacatcatgaatatactccgcctcttccttataccaagaaggtattaacaagtgtgtctttaggatggctagcatattttgtgtttgaaacggattctcatgtaagttaaataagctttcaattaaaacaaccagaggatgatacttcatttcctgttgtaaatcattaaaaaatggaatctgattttgacgtaaaattggcgtcaaataagtctcgtattcctttaaatttggagctaaaatcaaaaaatcatgatagcgatagttgcttagtgctacctgttgataaatagtccgcgctacaaaataagcctctgcatatcgagagtctgctttaactaattgtacctgcttcaattcgtcaactttaggaattgtctccgtccaaagactatttaatatttcacgaccatttgattgcgaattaagcggaaaagttgctgtcacgtagtccatctttctctcttgtaagaacagcgttaagcgcttaatagtttgctggattacataatcataatctccttcttccgcactagaattaatttcacctaagcgcgttttaaatgcaaggattacatcttttgctttacgcatcaaaattttaatcgttagtgtttcctgtaatgaaaaatgtgaaaaatcacagaaataaaaactggcttgctttaaatttttacttttagctaaaatttcatttagttgcagctgaacctcattcttagtagagaatttacccgcaatttctttaataaaggcatcatagataatccgcaaatcatgtaatttatttttagtttcttgatctaaattatcctctgatatctcgtctaaatctaaatttccgtcatagacttgcaaaattgtctgataaagctgatttactaatccagaattaacattaacattttccaaaatagtcaattcatcttttttgttctcaataatatgagctaagagcattgcactagctgcatcatctagttgattaggcaatccttgctcggcatcttttaagaaaaaccaagctaaacgcgaaaaagacaaaacatgcaaatttttaactgcagtctcagtttgttgtttgcttgttgctaatttgttaattgccctaacttctgtggtaaacttaatatgattaggaacgatgataaaagtttcttgttctgggtgttgctgatagttttcaactgcttcttccagaattttttcttgtaatgggtcggtttgtcgtcctgtaagaattttgatcatttgttcgcactccttgctttttattttatcatagcaagggcaatcttttgtataaatctagtttaaggatgattaaaaatgaaaagcagctatttagctcatggcaaggtaattattattggggagcattcagtagtttatggatatgatgctttagctatgccaattaaggctttacacattaaaactactgttgaatctgcttctcaaatgtggatggataccgctcgctaccacggtccattatttgaagcaccggcagaatatgatggcctaaaatacgtagttaaacatatgcaaaaaaaggctggcaataaccatccacttaaaattacatacactggtgaaattccaatggaacatggttttggttcaagtgctactgttgcattaggtaccactagggcaatgaaccaattctttcagctgaatatgactgaaaaagaaattatgactgtaactaatcatgctgaaatgatcaatcatggtaaagcttctggtcttgatgcagccactgttaattcagattatctagttttttttaataaaaaaatggggcctaaaatattacaaaccaaattaggagctaccctgttaatcatggatactggtcaactaggcaatacaaaggaagctgtttttttagttaaaaaaatgcttgaaaagtccgactatgccaagaaaaaaatagctcgcttgggtgaattagcggatcttactaaaaaagcttggatcaagcacgatcgtcaagcagttggacagatttttaatgaagcacaagaaattttgcactcatttgatctttcaacaaataaaattgaccaactgcaaaaaattgccttgtcaaataacgctttaggctttaaattatcaggcggaggtcttggcggcattactatttccttgtgcgataacgaaactgtcgcccaagaaattgcctctaaatgtaaagatttaattagtgactactggattgaggagatttaatgaatagaaccgcacgagcacatacaaacattgctttaatcaagtactggggcaaagctgacgacaaattacgtcttcctttaatgtctagtttatcaatgactttagatgctttttatactgatactagcgttgaaaaaacagatggtgaaaatcaatttttcttaaataatcaacagcaaactgctgcagctagtcaacgtgtttttgcttatctaaaaaaattgcaggctcgttttcacgtcactggcaatttaatcgttaaatctgtcaatcacgtccctacttctgcaggattagcatcatctagttctgcttttgcggcactagctgctgctttttgtcaatgctatgacatcaacattgatctagaagatttatctcgtttagccaggattggatctggttctgccagccgctccgtttatggcggttttgctgtttggcaaaaaggtaatagcgacgaaacatcttacgcatatgcactagatgaaacaccaacgatggatcttcaccttttagcagttgaattaaataccaaacaaaaaaagatttcttcgacttatggtatgaaagatgcccaatcttctccatttttcaggccctggcttgaacgcaacaattcagaattaaatgaaatgatcaaagctataaaaagtaatgatttcactgccctaggccagttagctgagttaaatgcaaatgaaatgcatgcaattaatttaactgcacagcctgaattcacttactttgagccgcaaaccattcaagctattaaattagttgaacaacttcgtactgaaggaattgaatgttactatacaattgatgcaggaccaaatattaaggtactttgccaattaagaaatagcaaagatatcattcaacgcttttcgtccgaatttaataatgttaatatagtgaatgcaagttttggtcctggaattacttatttggactagttgtaattaaaaaagttaattagattcgaggatttagttcttttgataacagaaaaagcgcccggaaagttatatattgccggagaatatgcagtattagagcaagattgtcctgctattttagtagcagttaaccaatttgtacgtgtgtcaatcactaagagtaaaggggcaactggcttaattcactccaagcaatactcacaggattcgattcattgggttcgtcagggctcaaaaatggtaatcgataatcgtgacaacccttttgaatatattttgtcagctatttcatttactgaacaatattgtattgagcaaaatatcaagatgaaagtctatgatttacacgtcaattcagacttagattctgcagatggtaaaaaatatggtttaggttcaagtgcagccgtcacagtagctacagttaaagctatcttgcgtttttatggcgtaaaaatgagcaatgaactggtttataaattatcggctatttcacactattcagttcaaggaaatggctcagctggtgacattgcagctagtgtctatggcggctggttagcttaccaaacttttgacaaaaaatggttaaagcaagaattagctaataagactttagttcaagtcgttaatgaagcttggcctggcttaaaagttgaattactaactcctcctaaagatatgaaactgatgattggttggagtcaaaagccagcatcaacttcacgcctcgttgatgaaactaacgctaataaggcggctttgaatatggaatataaaaatttcttagcagcttctagagcttgtgttttaaagatggttcaaggtttcgaagcaaacaatattgctttaatcaaacaacaaattcgggctaaccgtaaattgttgcagcactttgccaaaattaaccaaattgccattgaaattccacgtttatcgcaattaatcaaaattgcagaaaattttggtggagctgctaaaacttctggtgctggtaatggtgactgtggcattgtgattacagatgctaataccgatgttgaagcacttgaaagcgaatggcgccataatggaattatgcctcttaattttaaggttcaccagattatcatggctcattgatggagagttctatgtcgattagatctgaaagaaaagaagaacatctgaagttagctcagatgttttttaataaagaaaaatataatagttttgatcaactgcatttgttgcgccctgctctgcctgaaacaaaagtcgatccaactattctgggatcagaaatgtttggcaaaaatgtttctgcgcctttttttatcaatgctatgactggtggctcagctgcttctaaacaaattaatcaagcattgggacaggttgcccagcagcaaaatattgccctagctttgggatctgccagcattttagctaaggaaactgatcaactagacagttttatggttgccagagcagaagatccagatggtgtactaattgttaatgttaatccagaaacaccaatctctgcaattaaacaaattatccaagaattaaatgcagatgcgcttcagatccatttaaatacaatacaagaaattgccatgcctgaaggtgatcgtgactttcgttggcttgattcaattaaagcaattcgtaccgctatcgatttgcccattattattaaagaagtcggttttggattggatcaaacaagtattcatcttttaaaagtaaatggcattgaatacttcgatgtcgccggttcgggtggcacaaactttgcccagattgagaatgcacgtaatgccagtgacgtttcatacttagaagatttaggtttacctactgtggtgactgctctgatggcatggcaagagcaagttaaattttatgtttctggtggagtacgtaatcccctagatattttaaaaggtttagctctaggaggaaaatttgttggtatttcaaatgtttttttacaagaatacatccaaaatggtagtactggattagagcaattaattactaattggaaaaatgaattggctgctttaattgctgtttacggcaaaaaagatttagcatccctggtacaaataaaaaaatactataatttaccattaaaggctcaaatcgatcagttactgtaaagtaaaagcactagttaatgattactagtgcttttactttacataattttccttatttaatttcaagcaatttagcaatttctttttgaacagcactttcattacttgaaccaataatttgccctgcagcttgtttggcttctggcaacgccgttgcagtagcaaaactacggcctacatatttcagcattcctacatcattaccgctatcgccaaaagctatcatctcacttgatttgatccctaatttttgactcaaatatgctagacctactgccttattcattcccttagtttgcatatcaatcgagtctgctgcaccagaaacaaaaccaacctccggatatttttcttttaattcgcgcaaaattttagacattttatcttctggcactgtcagactgaccttgaaaatctgatcatcaatttctccaaaagaatctactacagtaatatgctccatgtattttttcatttcttgtttataagctcgtccactgctctttttaacataagcacttactagccccatcactacagctggatacggatattcagtagttatttttaataaagtttgatatatgtcatcacttaacgagtcaacatgcaaaatttgtcttccttgagcaactaatgccccattttcagctacaaaataaattttatccaaaacctcaggaaaacgagtcattaagttagcatattgattgccactagcaactacaaatttaatcccctgcttttgcatttccgcaaattcacgcaaaaataattctttatcatagtctttctggtcagttaaccaggttccgtccatatctgtcgcaattagttttatcattttctcaatccctttgggtaaaagttcttcaatacttgattaccagcgattttgccaaaactaaatattaatttttgatagctgactaacacaaagccccgcaaatcactgtccactttaacggtttcaccgtgcaaataattttggtattcttcaattgtcggtaaatcataaacccgttcttgctttaccttacctagcacttctgccaattgatgtcctggttcaaaacgttttttctttaatatacccaactcgactccattattaattacatgaagcttacttttttcaggcaaactgattgcaggaatatagacatgttcattacggacttttgctttattacgccagtcacttaaagcaactggtaaattaaactgatccattacctgaccaactagttcctgatcatttttggttaagcgccacggatcacgcttggcttttttgtttttgctctttttttcaattctagctttacctactttttgtaaaactgccacaaattgtccttcacctataccatcttgaggccaaaagcgtaatgttttagtcaaatcaggatttccatcagcccactcaggctgtccaacatcaatcttattagtttgtatccctgtatctaaaattgtaaaaccatattctttatttaaccagctaacaatctgctcatcctcttctggtgcaaaggtacaagttgaataaattaagcgtccgccaggttgaagcatcttaacagcttcattgaggatctctttttgacggttctggcatgttaaaacatagtcttgagaccaataatcaattgcctccggattttttctaaacattccttcaccactacatggagcatcgactaaaatcacatcaaaaaattccgaaaaaattggaactaacttttctggactttcattagtaattaaggcattactgatgccccaacgttcaatattttcccgtagtgcctttactcgtgttgcagagatttcattagctactaaaaggccctcacccttcaattgttctcctaatgctgttgtttttcctccaggcgcagcacacagatctagcacgcgctctcctggccgaacaccactaattgccgcaggaaacatagccgctggatcttgagaataaacactaccgcttacccactcaggatcttcccccgatacttcaccataataggctgaatttatttgcggtactgaatcagtaagctcatatgaaaccttagtaggcttcaatgtattaattctaaaagcttttttgctctcttcattcatcgccgcaaatagttcttgtgcttttttggtacctaataatttttcatatttagttttaaattcatttggtagatttagcaattttcctgtcctttctcactaagtaatagaccatcccacaaaacgccaatacaattacaacccaggaagctattaatgtaactattaaagaaccatatgttgaataaaaggcatgccatcttaaaaagaagtatgtagcaagggcaaaaatagcctctattaaaaataaacgtacgctgcggttaattacccaattgcgcagcaaatcatcgtgtagacgtgttaaacgagcctgacgcttaattcctattgcaagcaacatatttgtgatcattccgaccaataggcaaacaactaacattaaaatatccggcacgacagataaacgatctcgatgatgctcttgaacaaaagacggaatatgcaaactagcatgataatgcttagcaatcttttcaatcactgcaggtgttgcatctactacaattcgataattcttgagctggtctttagcagttggctgatcaattcctgtacttagataatatttatccatttctacctgtggatagtccttaaattcgcctataacagaataataatttttgcctaaaataacatatttattattctgcacatctaataaattaagtttaactgttggccccagcaccacaaaagaaacctgtcctttaaaatcatcaggcgaaaaatagcgaccactctcagttggcaagccagtaacggcatgattagcccaaacaagcacttgttttttttcataattattatctagatgcagttgaatttgatgattcgcataatttttgtccaaatattttaggaaagtactaatcttatcatcactatctgttctaaaatagcgggtattattagttaagccgtgtgcttccagcaattcgtcagcataattagattcaatattggagagcattgttccaattcctaaaaaagataataaaagaatcagtaacaaaaatatctttttaaaattcattttttatttcaaatacctgttcattaataaaatcgaagctttgcaaggaatgattaatctcgtctaaagctgcactatttttaaaccaattttggtgccaaaattctggtgaattagtagcaccatctttttcaccaacaaagagcaaatgacaacttggattatacttatgccaagctgccacagtttctaaatctccgtgaccgaaatttggtgaccacgaacatagaactagattaactgtgtgatacttcttaattgcttggtcagctggtaaatcttctactggataaaaaggcttagctccagtggtcgacgtcttggcccactctaatgagtctgtactgtgaactttaattccaacctgagtcaaagcttgagaccaatacgcgttgcctgccatgatttctaacgctgtttgtacatgcagcttatttttaattaactgcgcagtctgaatattaggcagagaccagatgccatatattaaagagagatattgccgaaaattattaagtaaattatttaaatcccttaaggccccttctttatctggtcccacctcaactaaaacttcttcaaattcatctggcaataaacctaatctgcgtggtgcccgcttcaatggcttacctgcttgtacataactatcaattaatgctatttcttcaacttgtcgtttaaccgcagtatgatttatctcttgctctaattttgttaatttcgtcaaaaattttgtcatacttaaacaccttaatatgattttaccattcaacggcggagaattcagttataataagactagcaagcaaaggagatattctatggttgaaaccaaaaagagaaatgatgatgaaagcattggccgctttgttttagacataattattatgtttgcaattttgatgggaatttactactttatttttagttttttcctatcaaatgaaacagtatctggtccatcaatgcagcccacatttgagaatggcgatcgtttgattgctgtacgtcattttacgcctaaacgaaatgatatcgtcattctaaaagcaccagaccaaaaaggtgctctgtatatcaagcgaattattggtacacctggtgatatggttacttctaaaaatgataagctttacattaacggcaaacaaattgcagaaccatatttaaataatggctaccaaagaaagtcacataaattaggtgaactctatactaacaatttcactttaaaaaagcgagtacctaaggatagttacttcgtcatgggagatcaccgcgatgtttccaaagattcacgttacttcggttttgttaagcgcagcgcattagttggccgagtcgtcttcaggtattggccatttacgcaatggaaaacattttaatcaatgaaattgcaaaaaattttattttttattccaatttgattaaaattagagggtaaggagaaattattatgaatgagcaagaagaattatctgatgcaattatcaattttcaagtaaaacaccatgttaatgacactgacctagcctttgctagtcacctctcagttgaaaaagttcacgccatgaaagttggcgatggacaattcacagccgaagaagtaaatcagctttatgattacatgtcagcaaatgcttagttaactacaaaaaagagcttcatttcttgattgaaatgaagctctttttttgcattaattaatctatttttggttcaagatatttcttcacgaatactagattcaaaataccgaaaacaaggctaacaataaacaagcataaatcatctaaccagattggatcggttgcttgtaaatttggactcttatcaacaaagccctgtaacttagacataaagatcatgccgcagtaagctgcgacaattaccaaaattgcgataattaacaagcgagcccaaactgtactcttaaacggcaagaaatcagtaattactcgcgaactaaaattggcaaagctgacaaagaagtaaatgattaaaattatcaaaatgataaacaaccaatgaaaagcaagcattcgattgctagttatttcaacgccgggaactgttttaattggatacagaccaaactcacgaaatgcttgagcaaaactgtctgccccgcaactagggatcagcaacagactattaacgatttcttgcagcaagaagaaataaccacatgccagcaaactgctaaatatattagctaagtatgtttttcgttcatcgctagctgctaaatgccaggtttgactcagattaattttttcattttgccaacatgtaatcgcacaaaaggcaaaatcaatgtataaagtcacatagacaaaattattgcgccagaattgccctaaatttttagacggcagatttgctagaccattccaatttttgaaaagaagaaaataacctgataaaaatactacagcaaagatattaattaagaaaaccaaataaataaattttcttttttgcgtccacatttgcctaaacaaggtccaaaaattcgtcactatctacccctccccttcaattaacgattaattatcttaggttcgacaaatttactcattaagtagctgtcgattgctcctaaaacaattgctcctgcaaagtactcaaccactgaaatacccaatggatcatatgctgcttctttggcaaaacgatgcaaatacatagcagtaatttgttcgtttagctgttcagcaatcaagattgcaataatcacaatcactgccatcacaaataacttaatgacaatattattgttaactggcaattgatcaacaattactttcgtcaaaaaattagcaaaactgacaaaagtcataataactaaaaccgttccagttaagaacaatagaaattcaattaataaactagcatctgcccaagtaactttagcatcaactaagtcatgaagcagtgaataatgatgacttaaattatcaatcatagcagcaacgaagcctaaaatgacttgaattacaaaaatataaatacattcaactaaactagaaagcatattaatcagccagattttgacacttgaagctggagctagctgccaagtttgactgaggttgattttttcattttgccagcaaagcagaccaacaaaaatcacatcggcaatcggcgtttcgagcattcctgcactaagcaaacgatctagccaattactgtccttactaatgttgagataagctaaattgcttttatctaacagagccattaccagcaaaaaaaggactgcaaaaacttgtaataacaaaactaagttagcgtagcgccttttttgcacaaacatttgcttaaacaaggtcttaaaatttgccataaaaaactcctaattctgttttgcttctacgaatttattcaaaagcaagatatcgatcaaagtaatcacaacatcaaagaccaagaattgaagaatcgtagtggcatagttaatatcctggctgttgaccataaaaggactaaactttcctaagactgaaaagataattgttgccgcatggcctaaaatccaaataatcgcaataattacaattactctaataataaaggtccatactttacttgagccacctggcaaaaaatcaataatgctgcggcttgctaggttaagcaaacttacaattgcgtaccaagcatagccaataaaaatgattagcagcaaacttccgagcattgtttgccagtctcttgctgaaagatggatgctagcctgacctattgctttgcgcacatcttgatcagacaacatcggcaaaagggtaacgattatcgtgaccgcttctaaaattcctaaccaaatataagttaaaaatgctgtcccaaaattgctaagcaaaaacttagtatcagttaccggaatcaagcgccaagtttgactgcgattaattttttcattcttgattgaagaaataatccaataaacaaaatcagcgataaatgacgttatcagcatcattactgcaaatacagcgagaaaagcaacaatcacattgacagaactagtattttttccattaacaaattctggtgtaccattttccgaaacaaaaccaataattgtaaaacataaactagcaaaggcttgaattaagaagattaaatagactgacttgcttttttcttgaaacattcgattaaacaatgtgttaaaactagtcattattcatcatcctcatctgcataaaaactttcatagtattcttcgattgacttatgcgtttgacgaatgtcatctgctgacttgtgttccaaaacggtatgatcttttacaataaccacttcatcaagcaatgatgaaatttcattgacaaagtgatctgagattaaaatcgttgccttttcatctttccacaaaatgatggaattaataattttctttcgagccattgcatcaatcccaccaaaaggttcatcaagtaaatacaaatctgctttacgagcaaatgttaaagcaataatcaatttttcacgcattcctcgtgataactgactcaacttcatttcaggatctaatttcataaacttacgcagctcatcgaattcattctcatcaaaatcttgaaaaatcgttgcgtaaaatttaaccacttccttgatctttgttgaatcgctgaagccagttaaaccatcagtaaaagacaacttagcctttctttctgcctcttttgttgccccctctaaattaatttcgcctttgtaattcttagctacaccggcaataattcgcatcaaagtggtcttaccagcaccattttcaccaagtaacgcaacaatcttgccaggagctaaattcaagttcacatcttgcaatacttgcttctgatttttcttataacttacatctttaatagctaataaatcattcattctgatccccaccattttttaaataattctctaacgttgaaactaactcgttctttcctattccaaactcttccatattttgaacaaactgttctaattcattattaattaatgactgcttggtttcggataatagtttagtatcttcagtaacaaaattaccttcgccacgtttagtataaagaataccttgactgttcatctgttgtagtgctctttgcacggtattaacattaacggttaattctagagcaagttttctaacagaaggaatcttctcaccagctgttaacttgcctaaagcaatttgacgatacaagtattgttcaatctgaagataaataggaatattatctttaaattccatttactcagctcctattttgtactgtattattaatctattacactaactataatacttactttagtcactttttgcaagggctaagtttaatcactttgtttcacaagttcataaaagttaaaagtacaacaaaaagatagtctataatcctataatgacggtaattataaactatcttttatttttaatagtattagtgcataatttttatttattaactatgtttaccctatttcctaatctatcaataatctcatattagatcagaaatagaattattgatatttttagtcaaaaatgtttcacttacttagctctttcagcatttaattcagccattttgatcatcacgtcaacagctttccacatagactcaagaactgtgtattcataacgaccatgcatgttttcttctccggcaaaaatattaggacatggtaagcccatataagtcaattgtgagccatctgtaccaccacgaaccgggtcttcattgacttcaagaccttctgctttataagcatcgcgcgctaagtcaacgatgtccatatgtttctttaattcatcggccatgttgtaatattggtcccacattttaagtgtaattcgttcagtaccgaattcatcattcattttcttaacgattgacttaaccaaattcttccgctcttcaagcccatcacgttcaaaatcacgaataatgtaatctaagtgagcattatcaacagtaccagcaaaattcattagatggaagaaaccttcgcgtccatcggtatgttctgggcgatcgtgttctggcagttgattatgaaagtcaattccaacttgaattgcattaatcatttgccccttagcaacagctgggtgaacattaactccctgaatatcaagactaaattgtgccgcagagaatgtaccccaatctaacttaccaggagcttcaccatcaacagtaaaagcaaagtcagcaccaaagtcttcaacatcaaagtgttcagcaccagtaccaatttcttcatcgggagtaaaggccaatcgaatcttaccatgcttaatttctggatgattcattaaatattccgcaaaagtcattaattctgacacaccacacttgtcatccccaccaagtaaggtatcacctgaggccgtaataattgtttgtcctttataattcttcaaatgtggaaaaactttaggatcaagataaaactctgaatctcctaattgaattttgctttcgccatcataattttcatgaatctgtggtttaacattttctgaattaaagtctgccgtatcactatgagctaaaaagcccattactggaacatcataatcaacatttgacggaatttcagcgattacactaccagcattttgattgtagtgaatgtcacttaaacctaattcttccaaatctttcataataacattcttttggaagttttcttctctttcagttgatggaaagcgatctgaatgttcgtcagaacgcgaattaactttaacgtactttaaaaatctaggtaacaaattaggatattccatatataactctctttctaattaaaataagtcttgaaatggattagtagaaacctcggaaagctcaattccaacattccagttattttcttcattccactttttaagtcgaccatagaccttgtacttaaatagtttttcagtataatgaccaggatcaacaacagttaaaccagatgaaatcatatcatggcctacatgataataaacatccccagtaataaaagcatctaaatggtcatctaaggctctagtccaatatttaccaccatccccacaaataaatcctacactggtaattggcttttcattgtttgcagtaatcagacgtgccattttaatttgcattttttctttaacataataggcaaaatcataagcagtcattgttctaggtaactttccttttctacccatagcaattccatcatcatccagacaaaatggttcaacatcttgcagacctagttcctctgcttgccaatcagcagatccatcttgggctttatctgaattagtatgaattgaataaacagtaattccattcttgataatattgccatacattgcgttttgtgcattcgcaaaatccaaattttgtgctggtctaaacattacaggatggtgactaacgatgaaatcaacccctttttcaacagcttcttcaactacctggggacgtacatctaaagtagtcattactttggtaacatcagcctccattgatccaatttgcataccaacaggatcaccttgtgaagcaatgttttccggaaaatcttgtcgcaaacgcgcaacaatgtcttttactttggtcatttctccaattcctccttgattaatttaatatcatgatctacttcattgattcgatcttcgtctttttttcttgctttattcaaattaaccaggaatctttgataataagcgagttggccttcccatttctgataaaaaactggattcttttcttgtacaataaaggggccaaaaaagatttccttttcagtcatctcatgcttttcttcagttaagctagccttaattaattcataagtatgcccagcctctgcaattaatttttctgagataatcttataattatgcatcatcagccaattacgtacccctgcttcgcctatattaggttctagtaccagagttttaaattgtgcatctttgctccaagctctatcaagaatatcagtcattaacttgccgcccattccggcaatcacaactgtatcaatctgatcagcatgagtaacggtttctaacccactacctaagcgagtttcaatttgctcggttaacccagctgctgcaatatcatttttagcattttcaagagggccctctgcaacgtcactagcaattgcataatcaattttgccattttttactaattcaattggcaagtatgcatgatcagttccaatatcagccactcgactgccaggatctaccatctttgccaacgtatttaatcttaaattcatgtttcctccataaaagatatggttaaccaaattttagcatatttcatagtcttattttgctactatttgatataatcgtcacagaaagcgggttttttacatgagtagaacagaaaatgtcacattaactaatatgtgcatggttaaaaacaaagatcaggttttagttcttgatcgcaacgatccggtctggccaggacttacttttcctggtggtcatgttgaagcgcatgaatcttttcatgattctgtcgtcagggaagtcaaagaagaaactggattaacgattagtcatcctcaattagttggtgttaaacaattttatgatcacaatgatgaacgttatttagtatttttctacatagctgaacaattttcgggtaccgttaaagaatcagacgaaggtaaactaacctggatgagtgctaaagaattgaaaaagcaaaagttagcttacaattttgatcatgatttaccagtattttttgaacaaacaattagtgaacatatgcttgacggaaagcgagatgagctattttaatgaaaaaaactgaaagtaagtttgcacttttagctgctttaattgctattttagcttttgcctctattcccttatggcaaaacaatctgaatagtttacgaccacaaactcacacggttaagaaaaagaagactgctaaaaagaaaaaagtcgttcatcttacttggggttacccttttaagaagctctatgaaaagaaaatcaaatttaaatctggacaaaagtttggtgaaactgacgtcattcgtcgagtctatcctagcaagagttattttcatgatggctatgacttcggatttagtgaagttggacattcttccgtatatgctgtgcatgcaggaactgtccatcgtgttaaatacgccccaggtttaggactttatatttggattatttccgatgatggctatgttgaagtttaccaggaaggcttcctcagtattactgatatttatgttaaaaaaggtcaaaaagtcaagttgggacaaaaaattggtaaactgaccggctctcacattcatttaggagttactaagacagataaagattacattgataaaaagcatgacaatacgccatgcaaatactattggaaagataatggcacttggttaaatccaatgaaaatcattgaagataatctaagggcagcaggtaaagatccagtccaataaaaaagagctaagtaaaacttagctcttttaatatagataattataattaatccatgaaatcacgtaattgatttgagcgacttggatgacgcaacttacgtaatgccttagcttcaatctgacgaatacgttctctggtaacaccaaataccttgcctacttcttccaaagtacgggtacgaccatcatcaagaccaaaacgcaaacgcaaaacattttcctcacgatcagttaaagtctcaagtacttgttcaagttgttccttcaacatttcgtaagaagcgtgttgttctggactagttgcatccttatcctcaataaagtcgcctaagtgtgaatcatcctcttcgccaataggtgtttctaatgaaacaggttcttgagcaatttttagaatatcacgtactttattggttggcatattcatttctgcaccaatttcttctggtgtaggttcacggcctaagtcctgtaacaattgacgttgtatcctgatcaatttattaattgtttcgaccatgtgaacaggaattctaattgtacgtgcttggtcagcgatcgcacgagtaattgcctgtctaatccaccaagttgcgtaggttgagaacttaaagcctagacgataatcaaacttatcaacagctttcattagtcccatattaccttcttgaatcaaatcaaggaatgacataccacgtcctacataacgcttagcaatagaaactaccaaacgaaggttggcttcggctaattcttgctttgcctcttcatccccggattcaattcttttggcaagagcaatttcttgatcagcagtaagaagtggtacacgaccaatttccttcaaatacatccgcactggatcgttcatgcgtacgcttgatggagcagacatatcctttaattcagccttttcaacatccttttgtttctttaaggctaactttgaaggatcaccgttttcatcaacaatgctaataccattatcttcaaactcttgtactagttgatctacagccttgccttgtaagttataaggcttaatcaaacgagcagtgaaatcttcttcagtgatcgacttatctttctttacgtcttttacgacttgcttaaccatcttatccaaagatagtttttgtgtagtttctttttctgccactaaaaagcctccttattaacctaagatccgttttaatccaataatctcctgagtgattgcaataattccttgtgcatcatttttgcgcttagcatcctgtaattgagcttgaagctcattcagcctggaatagatgttgcgtctttttaatgctagaaccaaagcatcaacttcttgaattgtagaatcttttggcatctgtgccatttcagcatctactattataccttgaagttgctcaggaataaaatctaagaacccatcaatttgtggattttcatgagtttccgcatattttaaccaatcctgtgccagagtttcaaaatcctgattaggaaaatgaaattgcccttctaacatatatttttgagcatcagttgaatgaataaataaatacaagagtctggtctgactaggatttttttcaactactgactgctctgtaggcacgtcttcatcaccaggtaaaggtacgtctatcggataatcaggtgaatttctttgagaattacgtacatgattgcgtgcccgattatttcgccgtctttctttagcaagatttgcctttaacgaagcaatagaaaccccactagacttcgccaatttttcagtatacatatcttgctcaactggattgcgcacttgtgcaatttcttttacggcctcacctaaataagcaatcttttcacggtcattatctaagttatatttttgttccaaccgttttaagaaaaagtcagtcggcgttaaggcacctttgacttcttccagatacttctcagcgccatattttttgacgtattcatcaggatctagtttttctggtaaaactacaattcctaaattaaaattgccatctttattaaacatacgtgcagcacgttcttcggcatggactcctggatcatctccatcataattaataatgatattaggagtaatacgtctcaacaaatatatttggtcatcagttaaactagttcccattgaggcaattcccgatttcacccctgctttatatgctgcaattacatccatataaccttcatatagaactaagtgaccttcaccacgagctgctttctttgcttctgcaaagtggaataatacctttgacttggtaaaaatccccgtttcaggactattcatatacttagcttcggtcttatcatcagaaattcgtctaccagaaaagcctatcgttctcccattttcattatccaatggaaacatcaaacggtcacgaaaacggtcgtataactgcccatccctagcttgaacaaataaaccactttgtgctagatcatcatcttgataacctttactacgtaaataagtaatcaaaacattatcagccttaggtgcatagcctatcttaaaatggtctaatatttcttgatctagttctcgcttttgagcatactgcatcccccgttcaccggctttagtagtcaaaagcacacgatgataaaaatcaacggcatcctgatgcatttgcataagtggatttaatttggtgccactattatgaccatatccattaggcatagcaatatgggcaaactcagctactcgctcgacgctttcgggaaaagttaaatcatccttatacatcaagaatttaaaaacatttccacccttaccacaaccaaagcacttaaaaaactgcttatcagcatttacagtaaacgacggagttttttcttgatgaaaagggcaaagaccaatatagtctttgccttttttctcaagcgaaacgtactgactgataacatcaacaatattgacgttactgcgaacctctgaaataaaatcttcaggaatccgtccagccatatgaatcaccctttttctatctaaattaactacttaataactaacttgcttaagtcacctaaacgatctgctaattcattaactgcatataattgtgctaatcggttattcttgaccttttcgtccttagccatgatcatattagtttcaaagtattgatcaatcactggttgcagttgaacaaaaccttggtagagatcagccaaactttcaatatcttgcaagttttgaacgccagcgtaaagttctttttcactgttatcatcaaagagactttcatcaacagcagtattactcttaaatttagccttctttaagatgttatcaattctagtcaaactctcaactactggcttgaattcttcatcatcatggtgaagttgcaatacagtagctgctgctaaaatttgacttggatcttgttgacttgaagcaagaacagcatcaataatatcatacttgaagtcattcttttgtaagtattgcttgacacgatcacgaatgaagtctgcaatttcctggtcagcatcactcttaggtagcttagctggagttacaccattaagcatactaatgatttctggtaaaacttcgttaaatggtaatgaccacttctcattaagtaagattcttacaataccatatgcataacgacgaagtgcgtatgggtcattagatgatgtaggaatcattcctgcaccaaagaaggttacaattgtatcaattttatcagcaattgataataatgaaccaaccgtagtttcaggaagtggaccttcagcagtggcaggcatgtagtgttccttgattgcaactgaaacttcttcgtcctcacctgcaagacgagcataatgcatgcccattacaccttgaagttctgcaaactcaccaaccatttgggtaactaagtcaaacttgtaaagttcactagcacggtcgaaatccttgactacattctctggtaaatcccaacgcttagctaagtaatcaccaatcatgcgaacacgttgcatcttttcagccattgaaccaatcttatcgtggaatgaaacattcttaagacgatcaacaaaatgactaagtggatacttgcggtcttcatcatagaagaattgagcatcgtccaaacgagcaactaaaactttttcattacctgaaataacattatcaaggtaatctttatttccgttacgaacagcaataaagtgattaattaacttaccagtttcatcatagacttcaaagtatctttgattgtctttcattgaagtaatcagcacttcatcaggaatcttcaaatacttttcatcaaatgaaccagcaaatacagtcggatattctactaaataagtaacttcttctagtaaatcacgatctggtttaacttgccagttgttcttcttaactaattcattcatttgacgaacgatcatatctttacgttcatctgcatcagcaattacaaattgatcttttaatgcatcttcatagtcatcagcattggccaaaacaactgaatcgcctaagaaacgatggccttgagttttacgacctgcagtaatatccaaaatcttaacgggaattacatcactgccaaataatgaaacaagccagtgaattggacgaacaaactcaaaatcatttgaatcccaacgcatcttagtagggaaagtcatcgccttaatgatatcgctcataccaagtaagatatcactagctttcttaccttccttttgaacgtgaacataagcgtattcagtacccttaagttcttcaaaatagatatcgtctgtagtcattccttggccacgagcaaatccttgagcagccttagtccaattaccatcttgatcttgagcaatcttcttagctggaccttttttaacttcatcaatatcgtcttgcttttcagccaaatcttcaaccaaaatagtcaaacgacgtggagttgaaaaagtcttaatatctttaaatttcaagccattttcttttaaaaattttcttgttctgtcagctaattgcttaacgctgcgtggtacaacgtgagctggcatttcttcagtaccaatttcaaataaataatctttagccattttctacccccgcctttttgtcttctgcacttttaagcaatgggaagccacgtttttcacgttcttcgacaaatttgacagcaacttcatgcgcaagatttctaattcttgataaataaccagcacgttcagtaactgaaacagcaccacgagcatcaagcaagttaaaagtatgtgaacacttcaaaatgtaatcatatgctgggtgaaccaagttcttatccaataaacgcttagcagttgcttcataaatatcaaagaattgaagcaattgttcttgatttgattcttcaaatgcatatttagaatgttcatattctggttgcttgaagatatcacgataaagaatgccattaccccattcaagatcaaatactgagttaacatcctgaatatatgacgcaaggcgttcaacaccgtaagtgatttcactcatagttggcttaacatctaattcaccaacaacttggaagtatgtgaattggctaacttccataccgtcaagccatacttcccaaccaacaccagcacaacccatagatgggttagcccagttatcttcaacgaaacgaatatcgtgttccaaaggatcgatacctaaaactttcaaactgtctaggtaatattgttgaatatccttaggagctggcttaataacaacttggaattggtggtgttggaataaccgattagggttttcaccataacgaccatctgcaggtcttctagaaggctctacataacaagctgcccatggttctggaccaactgcacgaagaaaagtgtaaggactcattgtacccgcacccttttcaacatcgtatgaaggcataatcatacaacctttggaggaccagaattgttccagcttaaagatcatattctgaatatttaatttcttatctgccatttcctttaatctcctcctgcgctaggccataaaaaaagcctatgcaaaattttgcataaggacgaaatattatcgcggttccaccctaattcaggaagtatccttcctgctcttaattgaacaatatgactagaggtgccttttcctagatgtcctcacaccgaccgacattcgctgaactagtacttttcttaaatcctcatcatcgtcaaatacgtttttattttaacacatgggtcatggtaaaaccagatttttactaactaaaaagttttaattcatctaaaaatttcttagtctttaaatttaggcctatcgtttcatggtaaatacgatcaatcgcttttctagtagccctcttcgtttcttcattaattttaatatcgcctaatcgctcaatcggtaataagccaattgttctaattacagcagtttcttttggctttaaatgcattcggctagtaactgtactaaaatgatcgctacaaataactccacccattttaatcgaataatcaaaaacgcctttttccttaccacaaataacacaatgctttagctgtggctcaacaccatatgctgctaatattttcatctgcacaatttgtgtaatcatttctgcatcaacgccactatctatttttttcaaagcaaataaagctaaatcataatatttaccaattggctgatattctacaaaggcgtgatcaattaaatcaaaaataaaagaaatataagcgttcttggttaaatcattatataagccatcaaactgccttgcccctttatatgtgcgtaaattacttaagcccttttcgctcgtataaattacgtaagtaccaatagaaaaatttaatgttgctgcacttaatcttgatttaggcctcagggctcctttaacaatcagagtcataatcccatcttgtttagtcataattttggctaataaatctgcttctttatatttctgccttttaaagataataccctgaacttcttttagttcacgtgccatatcatgactcctttagtatttaaaattcattttttatagatattctgatgaagatatcataatatcataaatagtctatagtacaaaaagactgctgtttcagcctccacatacgtggagaataccaagactttacccagaatcaacttcgaaactgggtttcagcctccacatacgtggagaatacagtaaacaaatcccaatataacaacaatcacaaaacaatagatcccaaaatttcatcactttgtcattactattgtatctatttttatcccattagttatccaacgaatagaattttcttgtctccctaaacatacaaaaaagacgtcatctttcgacaacgcttatacaacagtaattcaactaaagttcttttttgtcatagcctattcgctttaaaaagttagggtcagaacgccagttatgttggaccttaacccagagacgcaagttgaccttttcaccaagcaatctttcaatctcttgacgtgaattaatcccaatctgcttgagcatcttaccgcccttaccaataataatgcctttttgaccgtctttctcaacatagatagtcgcttcaatcaagagcttgccattttgatgagtattcatatgatcaactgcgacagcagtagcatgtggtacttcttgtgaagtcagtcgcagaatttgttcacgaattaactcggctaccacaaaatattcaggccgatctgtgatctgatcagcaccataatattgtgggcctactggcaaatattccttaatcgttttaagcagatcttcaatcccaattccttgagtagcagaaatcggtagtatttctttaaagccctcaagtttgtgatatgaatccataattggcaaaagcttattaggatgaatttcatcaactttattaattactaaaagaacaggaacttttacttcttttaacaagttggcaatgtattgatcgcccttacccatttcctcaggttcaaccatgaataaaactaaatcaacgtcattcaaactagatacactagccttatccatatagtcgtcaagttttgaatgaggcttaaaaatacctggcgtatctacaaaaacaacttgcatttcatctgaagtataaatacccgaaatgcgattacgagtcgtttgtggtttattagacgtaatggcaactttttgaccaactaaatagttcattaaagttgattttccaacattgggacgaccaactaaagcaacaaagccagacttaaactctttttcttccattatttacctctgccttcatctaattgatcaggatacaatggcaaaccataatcttctaacacttttccttgaataccaaacatttctttggcctcatccggcttaatgtggtcgtagccgtttaaatgtaaaaagccatggactattgtatatccaaattctcgatcaaaacctgtaccatactctttactgtgacgcttaatcacactaggacacataaatagatcaccgatatcctcttgaaagtctggatcatctgcaaatgctgcaagatcaattgaatcctcaccatcttcaattgcaaaggaaattacatcagtaggacggtctttgtcacgatactttaaattaatttcatgactacgatcttcgtcaacaaagttaatactcatctctaagttgttatctttgccaatttccttcttagctagcagcaaaagtttcataatccagtcttgccagttacgcttttcatcatctaaaaagccaacttcatcattataagtaatatcaattggatccatttttagtgtttaatgtcctctttttcataagcggtaataattttcgcaactacagggtgacgaacaacatcattagcagaaaagttgataaatttaatttggtcgatattcttcaagatatgtctagcatcaattaacccgctatgctgtcgaccaggtaaatcgacctgtgtcatatcaccgtttacgaccatcttagaattaaatccaagtctagttaaaaacatcttcatctgggcatctgtagtgttctgggcttcatcaagaattacaaaagcgtcatctaaagttcgtccacgcatataagcaagtggagcaacttcaattacgcctcgttccatcaaacggtcagtcgtattagtcccaagaatagcatacaaggagtcataaattggtctcaaatatggatcaactttttctttcaagtcaccaggtaaaaatccaagtgattcaccagcttcaacagctggcctagtcaaaatgattcgagaaacttctcccttcttaaaggcggcaattgcacaaactacggctaagaatgttttccccgttccagctggtcctattccaaagacaacatcagatttatcaatagcttcgacataacgcttttgtcccatattcttgactctgataggtctacctttagcatccctaatcaaaacctttttatataggtctgcaaagtactctgtggtacccttgtcagccatcttcatcgcacttactgtgtcgggcgcaccgatgttaacaccagtattcacaacactatcgagtgcctttagaacagcaactaccttcttgatcttctcttcatcgtctcctgcaatgacaatctcattaccgacatctgacacagaaagatcataaccttcagaaagaagctttaaatttccgtcattaactccaactagtttttgaatattttctggtctttgaggtgtaaaagttgtttgagccaaatagacccgctccttcttgttactactaatttagctgatcacgaactgattgcgaagcagccttgccatcggcacgtcccttaatctttggcattaaagctttcattaccttaccaaagtcggacttacctttagcaccaacttcatcaattgtttccttaacagctgctctaagttcatcctgattcatttgcttaggcatgtacttttctacaactgctaattcttttttggtttcttcagctaaatcatcacgattagccttaataaattcgtcaatcgattcttctctttgcttcttttcacgattaagaacagttaattcttcatctggagttaaatcgtgtcctgctttaattttttcattcattaaggccgatttgatcatccggacagtattaagagttgtcttgtcgtgattcttcatagctgatttcatatcagccatgatttgatctgacaaactcatttaatatccttctttctattaaaaacccaatagtattataacaaactatgttcttaactaaaataaaactaacaaatatttacttaacataatcaaaattatgcttcaagaagtcaaaaagaaaagctacccaaaaacaggtagctttctcagtagtttattaataatgtctacgcttacgtgcagcttcagacttcaactttctacgaacactaggtttttcgtagaattcgcgcttgcggtattcttgtaaggtaccacttcttgaaacggaacgcttgaaacgacgaagagcatcatcaatagactcgttttcgtgaacgattgtcttagccatgtgtgatccctccttccatttcttggcgttacgccatacatttacttaaattataccaaactaatctttagggtcaatacaattcaaaaactttttgataaatttttaagttaagtaaaccgactactttaccttaataaaagagctgagtttttattgttaatccgctttcattaatagtataattattttcagaaagatatttaataatacacgaggagcttaatatggtagaaacaaaagaccaaaatgaattaaacattattattatttctgatgcggctggtgacactgcttttagtaacgccacagctgcagctgcagaatttcctaactgcaatatcaactatcgtcgttacccctttatcactaaccaaaagaagttggacgaagttttaacagaaattgaaaaatatccaaacttggtaattatctacagtttggttaaagatgaaatgcaaatgccagttatcaaatttgcccgtgagcataatgttgaatgtgttgacatcttctcacctgtagttgaagcaattcaacaaactactcatatgacaccagatcaaaaaattggtgcacagcatagcttaaatcaaaagtactttgacagaatttccgcaatggaattcgctgtaatgtatgatgatggtaaagatccaaaaggtttcttggaagctgacgttgttttacttggggtatcaagaacttctaagactccactttctttgttcttagccaataagaacttaaaggtagctaatttaccacttgttcctgaaactcacattccaaaagaaatctacgaaattgatcctaagaagattattggcttgactaacgatccatctgtattgaacgaaatcagacgtcaaagaatgatcgcttatggtttgaatcctgatactacttattctaatatggattcaatcaacaaggagcttgaatcagcacaagcactttataagaaattaggttgctatgtaattaatgttgctcaccgctccattgaagaaactgccgcacttattttggagcacttgggtattgatgattacgctaagtaataatagatactaagatcaagtatgtccaaaaatcgttctagagtttctctagagcgatttttatttacagaaaaatatttgtaaatttatgcatattactgttctgactcccatgatctaacaatcatctaaaacagaaaacaggtattccaggcgcgatagtgggatctaaacctcattgatctaacaatcatctaaaactacctcacacctctattatttatttctttagatctaaacctcattgatctaaaaccgtacgttggtaccgccgcaaaagctaatagatctaaacctcattgatctaacaaccatctaaaacgtcttacgcatgtaaacgccgttttcacgggatctaaacctcattgatctaacaatcatctaaaacgtttcccaacaataaaagaagtcgcccattgatctaaacctcattgatctaacaatcatctaaaactataaatccggtccatcgtgaaaagcatttgatctaaacctcattgatctaacaatcatctaaaacctactattgacgtaaatatattgcacaagagatctaaacctcattgatctaacaatcatctaaaacggatgcttcacactttttgcgccaggtagcgatctaaacctcattgatctaacaatcatctaaaacacgtaagcaccttttgaattggagactactgatctaaacctcattgatctaacaatcatctaaaacttacaacaacgataaaaaaccaatcaagaagatctaaacctcattgatctaacaatcatctaaaaccgatatttcataatatctttttaatcaattgtctaataccaatcaacaagatctcgatcaatatatgcaacttgagcatccttgactgctaccccatatttcttatctgtgaattcaattaaaataattttcaatttaagttgtctaacaatcttactaagttcttttaactgtgtttcatcaaggtaatgagctacattacaaaacacgggaatactatcaagattatattcttgatgaatcttaagaactgtttcaattatagcatatggtgttaacatgaaactgtcaaatcttttgtgtaaatagatctttctcgtaaattgattttttaattatttatttaatcaaagtaggattctaaggtgtcctgaacctgaccaaagcctttatgaattcgattgaaataacggtcattgtagctcattgcctgaatgccaataaaagcatcaagcgactgttcagttggaaactctgccttaggcttagctttgcgcttgatcacattgttaaatgattcaatcatgttagtcgaataaattgaagctctgatctgcttgggatagttataaaagaccagcagatctggttctatgtctttcaagcttctgataacatgactgtaaaccttgccccatttggtatagaagtcatgcaggacagctgtggcttcttctttgtttgtctgttgatgcacctgtttgaattcgttcatgatcttttcacgatcgtcgacgcgtactttagcgcagatattgcgcatgacatgaaccaaacagcgttgaaaatgagctttaggataagtcctggccaaggctgttttcatgccaacaacaccatcagaaagaaaaagctcaacttgctttaagcctcgggatttcatgttttgaagcatatctgtccagacttcaatgttctcgctaggcgcaatgcagtagtcaatgacctccttgtgcccattaggcttgatgccaatggcaatatagactgcttcacgctcaaatgtttctcggcgcaaaggaaggtatgtcgcatccaaatagacgcagaaaaacttgtcgcttagcttgcgtttgtggtaagcctcaacctttggaatcatctgcttggaaatatttgatacctgagctggactgtaatggctgccatacatcttttcaattagatcggctatttccctggtggtcacgcccttggagtaaagcttgataatcatgctttccaagatatccgagtgctgcttgtagccaggcagcgtgtgctgatgaaattgaccgttgcgatcccgaggcacttgcacttcaattgggccaaattgcgtatcaactttgcggaaataagcaccatttctagagttgccagtattccagccatttctggcatagggatcatagcccagaaaggcggtcaattcagcttctaacaagttattaacagcctgttgtagctctttgcgcaataaatcatttattttgtctggattgaatagagcttgagcaaaatctttggtaaaatcattcatgaaggagttcttctttctgtatgtgtttttttgttcaaaccaatcatacgagaaaggaactcctttttctaatgtttaaagaaataaatttaaggaatcattcatccttacacaaactattttacagtctctatttttgagccaaattaatgtctactatcatttactaaattcaatgtaaacgttattaatttaattctatgtaaatcccaaaataaagtaaagaaatttcaaaaatacctagactcgtaattaaaaacatattcacatatactcatactaactttttgttattaatcgaaatttaattgtaactttctcgtaaaactgctgagctacaatagtttaggtgaattaagagaggagataaaaatcagaacttatctggtttctttttataatgaaatttcgtaaattaataatttctttgttaggtactgcattattaacttcaagcgttggtttatcaaccaccactgcttctgctgatacgcttgatgactcacaaaatacaactgaagttcaacccaagaacctcaagtgggcttatccgtttaaagccaacaagaaaaatggtgttcgtccaatgtataatgcacaaacttttggcataactaactatatgcgttctactacaccaccttcctactttcatgatggttgggattttggtttttcagaagttgggcattctaacgtatatgcaattcatcaaggtactgttaaaaaggttgcttatggcaacggccttggctggttcatctgggttattagtcctgataattacgttgaagtttaccaagaagggtttaataagaaaaaagacatttatgttaagactggtcaaaagattaaattaggtcaaaagatcggtaagctaactggctcacacttacaccttggcgttactcaaacaaataaagattacataaacaaatatggttttccatgtaagaattggaacgttaacaacggaacttggctcaatccaatcgaggttatcaaaagcaacttaaagaaatagttaacataatctaaaatattgaaagtaaaaaagcaggtcacagcttataacagttatgatctgctttttattaatcccaatgttccttgataaacttagctcttccaccagcttcttccattgcatatctaagtggatcttttttataaaaatcttggtgatattcctcagctggataaaatggcttagctggttcaattttagttacgattggtttatcaaatttaccactagcttgtaatctttgcttagatttttcagctgcttctttttgagcaggtgaattataaaaaattacaggtcgataattatcaccacgatcttggaattgccccattgcatctgtgggatcagtcacttgccaataatagtttagcaattgatcatacgatatttttgctggatcaaaggtaatctcaacagcttcagtatggccagtcgtacctgaacagacttgctcatatgttggattagcaacatgaccaccagtataaccagaaactactttttctactccgtcaactgtatcgaaaggttcgaccatgcaccaaaaacaaccgccagcgaagattgctgtgtcgttgttgggttttgccttggtatcagtggttttggcttgtttattattctctgtcattctttgaaatacctccattttatttgaattttattgcttttttaagttaactagtattatatacaaataaaaatgagatgcactttttattacctgatgtatcccattttatttctttacaaattattgcgtctttcttcaatatccttttcaatctgttctaaatcatcttcgatagcaagatttaaaataaagtttttcgtcgttgacctcttattaatgtaaagcttacgggcctcatttttatcattccactttttatttacttctgtatatttagccattaaaaatcactttccataatgctatagcaatcacaatcaaaacaccagttaacaaagctcttttaggatagaactttaatgaccatttagtatttttgccagtatgagttaattttataggctttcggcatatttgtcacctcttagctccgattctcttagcctcctttcactatatacaacacacgcttttacgtgtaacgcgaatgatatttagaaaaatatgccaaaaagggcatcaatctggccgtctaaagccaaatgatgctttaattgttttttcaccaaaatcaatagcctaacttaatgacactgtttttacataaacttattaaatttataattcttcatattttttgctctttaattaatttgttatcaaaattgaatacaacgattagtagctaagtccttcttacgattaccagattaccaattcatctcgattctattttagatttcttagcatcttttcactatataagtgaacgcaatctccgtgcaccatcaacaatatttttaaataatatacaaaaacagtcactctatagaacatatttttcagagcagctatttagcctccacatgtgtggagaatacttaagcctcatcttttggctgatgtaacgacttggatcacctccacatgtgtggagaatactaaacggctgtggcgttgacacagctcaaagtaggatcacctccacactcgtggagaatacactaaatgatccacgatatatcaacatccctcaatcgaaataatatcatttttaatcacttttaacaaagaccaataataaagccataattacaaaaagccactccaaataaaaaagaagcatttctgcttctttttgaatagttttgctcccaaagtgcccctaggattcaaatttcatttataaatccttatatatcaaggtttaagggctatccattaaacgatttcttgctccttgaagcgaccatatactttttcaacttcactaacactcatgaaagcatacggatctgctccttgcacgatttggcgaatatcatacatatcatatcgatcaataatggtaatcaaaactgtcttttcaatatgactgtatgcaccttcagcatcatgcaaaatggtaattcctctatgcatccggttttgaataccatcgataatatgctgtgggtgctgagtaacaatcattacttgcatcttctggtgttgggtataaaccgcatcaattactcgcccattaataaaaatagtcaaggcggaataaagagcacgtggccaaccaaacatgtatcccgcagcagcgataataatcaaattaataaaaatattaaattttccgtaactaatgcccgttttttgcctaattacaataccaataatgtcgagtccaccagttgaaataccgttctttaatgccatcccagttccaataccgttgatcgaagcaccaaaaatcgcacaaaccagtgggtccaggtgcatctgccaaggttgaatagcgtgcatcatgatagaacctagaacaacagcaacgatggtgaagaaagtaaatttatgtcctatcttgaaccaagccaatataaataaaggaaagttcaaaagaaagtacatcattgatgttgataatgtaaacggtagatatctttcacttacagtattaattaattgcgcaaaacccgtgattcctgacgagtacatatgccccggcgtccaaaaaaagttcaaggcaactgcaaccgcaattgaataaaagaaggcagctgacaattttgaaagaaaattgtagcgtcggttgaacttatcaagttgatccatagtttgtcaaatcctttgagcaaatactaatagtaaacacattaattttaacaaaagttttgcttctgaccaatctaaatagacatttttatcacttttgttaatcggagcaaaaaatgatactattcagttaatattaattagtctatccaaatagaaaggtgtctttcatgagttcttactatgaattaatgtggcgtgacgatgaactaacttcttataccactgacaagctgaattttatctacaacgcaatcgatcatcccttgtctgtccgctatagacagttatatcctaatcgattagactggcaaaaagccgtaaacagacacaatgcagctattcaaaaagtcaaagaccttcttattgaaagaaaagatagtcataatatacgtgaagcttggcttaaactgcatcccaatgcacgaactaaagcaaacaatggttttactgttgaacaactagctaataagttcccttacatggcaaaacaacttggtgcctttatggaaattgaaaacatcgaaatcaaatactttgatggagaatttaagcctagatatgacttagatgatttttctgatattttttctgccaattatcccactagtggctttaaacaaagtggcattactcaagaagctttactgaagctctaccctaacatcagtgctaaaaatttagaccaaattttaaaaatggccgactgtgaattagagcaagaaaatggcactgaagttattccttattggtatgctgtcaatgctaaaagaatgctaatcgatggtgatagttttgctgcaacctttgacgactaaaaaactgaccgcttggtcagtctttttattggataatttgaacaccgtgttcatcaggatgtaagattaatgtctcatcttttaaatcatgtttacgtaagcccgacaaaaatccagctacatgtttatcttcaatccacgtcataatcgttgaacctgcgccgctcaaataagttgccaaggcatgttttgaatgagctacctcccgcacttttacaagttctggcactagtttttctcggtaaacttcatggaatacatcttgttccattaattctcctgctttagggtagtcttgagcaaacaaactagcaattaaagtattagcaactgctgagccatgcgtagctacgccaaaagctaattctttaggcaaaactgctctagctgtcttagtttccaaattataatcgggtacataagccaccaacgcatatggaggaagtggtgcttcaactgcatcaaaatgatggttaacttcagcaccaacaaccaagccgcccaaaatagtcggtgcaatattatcaggatgtccctcgattttagctcctaattgaaccttttcttcatctgatagtcccagcttaccaatttgattagccaattcaattccggctgcgatagcacttgaactgctacctaaaccatgagccaatgggatattgcttttaacgcgtaaatgaagcggtggtaaccctggataaactgttagtgcagtcttaacaattaaatttttttcatcatgtggaattcctttcatcacatgatccacctgaaagcgatcggctaagcttaaaacttctacttccaaataaagtgaaacagccatgccaagtgaatcaaagccaggacccaagtttgccgttgaagctggtgctttaataatcattttttcccttcctttactgcaaaatcttatagctagcttttaaatattgatcttgaatcgctaaatcttgtagctgctgtcgactaatattttcggttacaactacaattcttgattgtacttgtttaatctcacgaaccggaatttccaaatcagagagtaatttactcaaatcaaacaaggtctcttctgcttcgaaagataaataataggaatacttcacatcctccgaacttgttaattgcataacatgggagaaattactaaatggctgaccggtggtctttttcactacgttttttatttcagtaatcacatcactcatgactgaattagccgttgcagagctacccgcacctgggcctgtgaatactgctgttcctaggctttggctcttaatttgtaaagcatttagttcatttttaatatgcgccataatcgcattttctggcaacaaacatggagcaacttctacaaataatttaccattaatatttttggcaatcccaatcagcttaatgacatagcctaacttctgagcctgtttaatgtcaaaatcctttagattattaatcccttgaatagtaaaatcatcaatactaatcttagtaccaaaagcaaacttgcttaaaattacaatcttgtatgctgcatccttacctgtaacatcgttagtgggatcagcctccgcaaagcccagctcttgagcatttttcagcgcttcctcgtagcttagtcccttttcccccatttgtgacaaaatataattcgtcgtaccattaataattccttgaatttcggaaataatgtcactggaataagaggtagccaaggtccgcaaaatagggatcccacctgcaacgctagcatcatacattaaatcacactttttacttgcagctaaattaatcaattctgaaccaaaagttgccattaagtctttattggccgtaactacattttttccagcattgattgctgcagtaatatattccttagcaggatgaagcccacctattaattcaactataattttaatttcgggatcttgcaaaatcgaatcgaaatctgtagttagcatcacttcgttagctaaattacgatgtttttctggattacgtactagagctttttcaatgatgatttcttcaccacttgtttgtctaatcttctttttattatttttaattatttttaaaacacctgaaccaactgttcctaatccaagcaatgcaattttgatggccatttgatcttatcctctttttaatgattttcttatttttacgattgtatcataggtgctaatcaaggtacaatagttataatattaatatttcataagataggaagattgtttatgcaatatcgtagtactagaggttcaaaagaaaacactttaactgcacctcaagcaattattcaaggcttggctcaagacggtgggctttacgtgcctgttgcctttcctcaagctaattttaagttagaagatttatccaaactttcctacaagcaaatcgctgccatggttattagcttattctttgatgactttactaaggagcaaatcaccactgcagttcaaagcgcttatagtgaacaatgggatgatcgcagcattgttccaatcgaaaagcacgataaccatttttacatggagctttttcacggtcctacccttgccttcaaagatatagctttgcaaatgttgccacaattaatgaccagagctgttcaaattgaaaagattgataaagatattattattttaaccgctacttctggcgatactggtacggcatcaatgcgtggctttgctaatcaaaagggtaccgatgtcatagtcttttatcctgaaggtggcgttagtcctgttcaacttaagcaaatgctcagccaacgcggcaacaatttgcgtgcaattgcaatcaaaggtaactttgacgatgctcaaactgaagttaaaaaaatcttcaacaatgattctttcaaaaaccgacttaatgctaatggctatcaattttcttcagctaattcgatgaatattggtcgtctggttccgcaaatttcttactacctctacacctatggacaattagtacgcagacaagaaattaaactaggagacgaagttaactttgctgtgccaacaggtaactttggtgacatcctagctggatattatgctaagaaattaggtttgcctattaaaaagttgatttgtgcatctaatgaaaacaatgtattgactgatttctttaataatagtgtctacgataagcgacgtaagttccatttaaccaatgcaccagcaatggatatcctagtttccagcaatttggaacgacttttatttgacctttatggcgaaaataactatgaagtcgctagtttaatgaatcaattgactcaacgcggtcattatcaagttagcggtgaagttttcactaaattacaaaaaaattttgcagctggttttgcaacagaagaagaggttaaatcagaaatcaaacgggtctacaattatgaccgctatgtaattgatccacatactgctgttggctcttttgtagcaaatcaatatcaaaagaagaccggcgatcaaaccccaatggtcattgtttcaacagccagtccatataagttcccagaaacggtgtatgaagccatcactggtggccctagtatgcaaactggcgtcggtgcaattaaagaattgcatgatgaattaggcggtcaattatcaatcggtgtgcgtgccctttttgatcgtgaacccaagaccgaaaaaattattgaaccaaatgatatggaaaaagaaatcagttcaattttagatttgaaataatagttaaggaaaaatagatatgaaagttgttaaatttggaggttcttccctagcctcaggtaatagcgtagataaggccctaagtattattaatgccgatcccgaaagacaagtcgttgtagtctcagcaccgggcaaaagaactgaggatgatattaaagtaaccgatctaatgatcacttacgcatatatgagcttgaggagtaataattatcaagacatcgctacccgtatttttaagcgttatgaattaattgcccaatattttgagctgcctgaagcagaattagaggatattaaccagcttctacttacattgccgaagctaagttaccctaataatgactaccgcatggcaacctttaaagcacacggaaacgtcttaatgcaattttgattgctaaaattttaaatcatcaaggaattaaagcacgatttttagagccaaaagatgtaggtttaattgtcactggcacttctaataatgctgaagtcaatcctgaaacttatgtgaacttaaaaagaattaaggctgcaaaagatgaaaagatcatttttcctggcttctatggcattacaccatcaggacatattgctactttctctcgcggtggttctgacattaccggtgctattctagctagggggttaaacgctgatctttatgaaaacttcaccgatgtcgatgctattttttcagccaatccccatatcgttgatcagcccaagccaattaaaagaatgacttatcaagaaatgcgggaactatcttatgcgggattttccgtctttcacgatgaagccttaattcctgctattcaaggcgaaattcctgtcaatgttaaaaatactaatgctccagaaaaacctgggacaatgatcgtaccagaggacggctttatacctaaacacacaatcacaggtattgccggaggcaaaaacttcgcggccctttatttaagaaaatatatgttaaataaaggtgctggtttcaccttgaagttaatggaaattttgcaaaaacatcatgtttcatatgaacatatgccatctggaattgatgatattaccattattttcaaaaaagatgtcttaactgatcaattaattgatgttatctgtaatgaaattcaaactagtctaaatcctgatcaaatgcagtggattgatgattatgcaatcacaatggtggtaggtgaagggatgaaggacaagctgactttatgtgctagcttgctttaccctcttggtaaaaagaacatctccattcaaatgattaaccagggtgcatcccaaatctcaattatgattggtaccagacggcaagatgaagaagtagttatcaaaaccatttatgataatttcattgctcaggataaaatttaacataagctataatataacaaataaaaaaatggtaaatctggttattagtaccttgatttaccatttttactttatgagattatctttttactaaaaagtaactactttatactccaaatatttttctccatcaaagttcattttcacaataaatggattctttggctggatcatagcaaaggcttcatatttaaagcttggatcatagtaattaattactgatccaattgctgtaccatgtccaccaataatcatagtttgatcttgatatttggacaaaactagcttcaaagcagcaacatttctcttctgcgtctcttttaaagactcgccatttcttagcttataatcaaaatcttcccactgtctttcacaatattcatgaaaattagaaatccactcatcaccaatttttctttctctaaagtcagaaatagatgataatgttagtttcttctcgtctataactggttgaattgtatcaattgcacgcttgaatggactagaaaaagcttggtcgatgtgtttatctctaaagtaatcagttactttttttctatcttgcaaccccttttctgtcaaaggacgtgttaaatcatcatgaactgataaatcaggttgagcatgtcttacaaaatatactgttgtcataattttctccaaagcgataacatattattatatttttacttccgttatttgaatcagattttacttaatctaattcataaattcaataataaattaacttttccttgctctaatccaatttttcacgatacactaaaagcaaatgtttgtatactcacgaaaggattttatatgggattagaaatactaaatcatactgatcaaaaactaatttccaatgccgatttttggcaattagttgattttcaaagagagtcaaataaattctctgagtttaaaggcgtttcctttgtttctaatattaaatttattgagcaaaatcttataccacgttttgaccagatcacactaattcttggactaaccgataatggatcaaattcaattggcaaaagaattgaccaaattttaaataaacgtcgtgatttgattgaatatagctacgaacaccaagatagtcccttcactaaacgtattttagatggtagtttacagctttttttcaccaaacagaatttgattcacactaagctttatttaatggaaaatcaaagcaagtactctgccttttcaggttcaatgaatcttaccgatacggctgttaataaaaatatggaacaattagtttgggattacggcaatacttctgatccattattcaattgctatcaacaaatgtttcaagataaccttaatcaggctacaacttatattaatgctaaaaaactatctggttatttagaagacaaaaataaagacgatcttcgcattcatgtaatgcaagattcttctcttgaaatcaaaaacagtcctaattcaactggtaaagacataattattctcccagctgaagagataaaaaagtatcgcgaccactacagcaaagatgatgaattaaagaaattatctgaaaatgaaaaactcgttgcttctcaaacagttactttatttggtgaaggtggcaataaaagacgtaagctagatacaatcgggcaagatttatatagcttgactcagcacattattcgtcaagacaaaaaggcaaaagcagatacatcacaaattgaaaaagaagaagatctcttccctgttcctgttcagttttacaataatggtcaattattccaagcctctaaaattggtgataacatcccttctgaagttattacttctgatttaactgaagggcaattaaaaaatgcgcttcaacttttctgtgatatcactcatgaatataatacttacaaagaagttggtgaaggctggcaagcttgtgactttatgctgtttctatatgaatcaccatggctttggaaaatccgcaatttatatgaattatctggaagcaatgtatctagagaagacgtgcctattgctacagcactaatcggacaaggtcgaactggtaagtccaccctagggaaaagactagccgctaaattaattggtgctcataatttcttagatagtggaatgatggatccaaagaattatgcccttggcaagagtaatatcaatatgacaattaccaacacgctaagtgactatgtatatacaaatggtcctgtaagtccattaatgattgatgatgtcagtcccgagcttacaacccgtacttactttgaaagattcatcaaggaagttactaacaatcgtaatttaactcatccctcaccagcattcattttcacgatgaatagacaagaaagctctattaaatcacaattttctctaaagcctgaaattatgcgtcgtttatggtatttaagctttgaatctactttttcaggtgaaagtgatcaacgtaatgctgcattaactagcttatttagtcgtgcaaatgatgatctttttaaatattgtcaagttgaattagcaaaattctttactaacgttagtgttgaagatgcgcagaagattgaaagagacttcttatatccaatcaagcatgttttaaaaactgcacttgataaatttgatatgtataaccaagtcagcaaatattttgaagaaaattacgattactccctatttgttggtcgaaatgattggggaatgttaatcaatcaagcaaaaatcggaagcgatatcttatttattaaacaagatgaccggctaaaagcccaaatcaataaagaacttttcaataaaatctccgatcaaacggcgaaaaacagcggttctactatgcttgatcgctactttaaatatttgcctagaaaatatcacattgcatcgcaacaaactagcaccggttttattattgatgttgaaaactttgataaatggcttgatgatgatacgttaatgaataagtatcaaaacagtagttcatttagagataagcaacaaagagataaccaagcacaattgactcaaacagttgatatgctagctaaggcaatgttagaagatcgtgaacagcgacgaaaagaagaggctaaaaagaaacgaagctggcttggtaattttttccacagaaattagtttataaaagatttcatattcaaaataagacttttaacctcttaacagttaaaagtcttatttactatagggataataatgtttggactttgattgatattcttttacagaaattatcttattttgatcattaaattctataattgatacaccatcgaattcactaatttttccttgataattacatttaaaatgccattcggcaatgctcgtatcaccattaattatgagtctttctattggccaagcaattacttttccttgtttattccaattttcaaaccaagatattatctcctttttatttctgtaaactggaccatagcattcactataaatagcattttcgtcaaatgtattttggactacttcaagattaggacttagccatgctcgaaaataatttctaattatttgctctttatccatttatagcgatgtccagcctttcttgtgaaaatggttaaacaagtttttattttctcttaaaagttgcaaaatattttgtttatcatctactacaatattcttatcttgtaacaaacccataatcgaatttagttgctgatagtcgacatttccaagtgtcaaagtcatatttgttcccttacctaaatccaaaatcaaatttaaataatcaggattaaagtcaataggactaagacgtacatttttacgatagacaacggcagctttctttacatcagataaattaataacttgcttactctttttatgtaaccctagcagttgcatcaattttatcacatcgttaatatcataatttataattgtaatattttcgctactaatctgccaatacggattaaaacaagtaggtaaagttacaaatacacctaaaattagtacaataaggaatagccaccaagcttgataaccaaatcctgtcaaaaatagtgaaagtaaaactaccacaatcataccgattaaaacatggctcaatttaacaggagttccaacaataatttttttcatcacgttcaccttcttactttacttcctatataatattataaagcgctttcaaaaataaactatagaggttaaaaatatgaaaataggtattattcaagctacatcgcaaaaaagtaaaaatttcatattagagaagtatatcaaagaatctgtaggatccaatgatcaagtattcaattttggtatttatcaagatagttcggctagtctatcttacgtgcaagtttccctagctgtcgcattattaattaatagcaaggcgactgacttcattgtgacaggatgtacttctggacaaggaatgatgcttgcatgaaatacttttcctaatattcaatgtggttatatccccactccacaagatgcttttctttttggtcatatcaataacggcaatgttgtctcctttccactaggacttaattggggttggagtggtgaaatcaattttgagcagactataaaaaatctttttgaacagccttggggacaaggttatcctccttcacaagcaaaaagaaagataagaaatgctcaagaagttaaaaatctcaacgtaattagtaagaaatcaatgattgacattatacctaaaattgatcctgatcttattttccctgtgctcaattatgaaccgatttataacttcataattaaaaacggaaccgatcaaaaattaatttcaattatcaaaaggataaaaaatgactacaaaaattgaaaaaatatctcctaaaatctacaaagtaactgataacgataagcatctaggcactatttctacttatcacaatctttttcataacaaatatatttatctaaaattcaatctaagtgattactctgtaaatattccattttcaaaaatagttcaagcagagcaccaagcattgcaagtcatgattgattcaaatgaaaatccaatcgtagattttttattaagaaatggttttatctgcaaacgacactgttatacgcttaccgttaacaaaaaagatttaaaaattgagatcaataacaaattatctcttcattttttcaatacagaaagtccgattacgaaactgtcaaatcttttgtgtaaatagttctttctcgtaaattgattttttaattatttatttaatcaaagtaggattctaaggtgtcctgaacctgaccaaagcctttatgaattcgattgaaataacggtcattgtagctcattgcctgaatgccaataaaagcatcaagcgactgttcagttggaaactctgccttaggcttagctttgcgcttgatcacattgttaaatgattcaatcatgttagtcgaataaattgaagctctgatctgcttgggatagttataaaagaccagcagatctggttctatgtctttcaagcttctgataacatggctgtaaaccttgccccatttggtatagaagtcatgcaggacagctgtggcttcttctttgtttgtctgttgatgcacctgtttgaattcgttcatgatcttttcacgatcgtcgacgcgtactttagcgcagatattgcgcatgacatgaaccaaacagcgttgaaaatgagctttaggataagtcctggccaaggctgttttcatgccaacaacaccatcagaaagaaaaagctcaacttgctttaagcctcgggatttcatgttttgaagcatatctgtccagacttcaatgttctcgctaggtgcaatgcagtagtcaatgacctccttgtgcccattaggcttgatgccaatggcaatatagactgcttcacgctcaaatgtttctcggcgcaaaggaaggtatgtcgcatccaaatagacgcagaaaaacttgtcgcttagcttgcgtttgtggtaagcctcaacatttggaatcatctgcttggaaatatttgatacctgagctggactgtaatggctgccatacatcttttcaattagatcggctatttccctggtggtcacgcccttggagtaaagcttgataatcatgctttccaagatatccgagtgctgcttgtagtcaggcagcgtgtgctgatgaaattgaccgttgcgatcccggggcacttgcacttcaattgggccaaattgcgtatcaactttgcggaaataagcaccatttctagagttgccagtattccagccatttctggcatagggatcatagcccagaaaggcagtcaattcagcttctaacaagttattaacagcctgttgtagctctttgcgcaataaatcatttattttgtctggattgaatagagcttgagcaaaatctttggtaaaatcattcatgaaggagttcttctttctgtatgtgtttttttgttcaaaccaatcatacgagaaaggaactcctttttctaatgtttaaagaaataaatttaaggaatcattcatccttacacaaactattttacagtctatgcatctgtgcaacagtatgctttttcccgtcataataatatcgcttaacaattttatctctaacttgatcatttaagtcttgtacctgagcctgctgctgataatcaactaaagcactcacaccatagtcaactaacataatcagaaaagcaagaacattgattaaaataaacttagtccaattacgacttaaaaggatattcgtctcttcttgtacaacgtaagtattggtaattgataaagcaggaataataatccaaccaattgcagttaaccagaaacgaactggattggttttaataaaagctttcaaattcatcttactttatcccctttcttactttttaatttaatttcttgatcaaattttgcttttaattctggcgtaaagttgtgagcaatcatcaaaatagtttgatctgttttgagcaattcatcaatgattttttcggtagctttttgatcgatcgcactagttacttcatccattaaaacaaacgattgctcgtgtatttccgttcgcgctaaaacaactttttgccgttgtccaccagacaaattttcactttttagatcaattgttgtattaacaccatctggcattttggctaagtcggattggagttgaactgcttgaacaacatcttgaagcttatcctgcaaattttcgttaaacattgtaatgttctctttgatcgttgcgggaaaaactactggattttgcggcatattgccaattctagcttttccttcaggaatgatagtttcattttcatctagataggtcaccgtaccagattcaggttttagcttacctaacaaaacattaaacaaggttgattttcctgttcctgaatcgccagtaagcaaaactttctgccctttttttattgtaaaatcaggataaaaaattgtttctccctgatcgtattttacagacaagcctgaaactttaagaccgtaggctgatactttatctttattttcatcaggaacttgctttcttaaatcggtaatctgttcgcgtaaagccttagttgacttaacttgcgttaacgactgagtaatattccaaattgctgaaaaaatcgtaaatgcaaaaccactagcaactgcaaaatcaccgaatgaaatcatattaagcaaaaacatgattccagcaataaagctcataccaatttgtgcaattgaattgctaaaagcattaatcaaataacttacacttcttaattttgcactacccttacttgcgtccacataatcactacttgatcgatgaatttgcttaaccaaacgactgtatgcactataacgacgtagttcctgcaatccaccaagccaatgagcaattgtatttaacagcttttcattctttttatttactttatctgtggcagctgatgttttcttctccataattttaggagcaaaaagtgtaatcacagctaaaatggcagtaaccaaaattagaatccagttcatgcttgctagtaaaacaatagcaatcacaatctctaaaaccccacttaagatagtaatccaaggtgtagcataatcatctgataagatttttaaattggctgttaatcggttctgcatactagagactttttcatcacttttttcataatagtaatgatgcatgatttcttgccgaattttatgcagatagttttgcgtctgcctagtgaaaacaacggtagtaattggtaaaagcaacgaagtgaataatgctaaaacaaactgcattatttgccaataaacatatgtattaaaattaccagcagtaattgaattcagagcatatttaaataaatattcactaaaactcccaaataatgcgtataaaacatacaataagataataatgcaggctcgaaacgagactgtaaaatagtttgtgtaaggatgaatgattccttaaatttatttctttaaacattagaaaaaggagttcctttctcgtatgattggtttgaacaaaaaaacacatacagaaagaagaactccttcatgaatgattttaccaaagattttgctcaagctctattcaatccagacaaaataaatgatttattgcgcaaagagctacaacaggctgttaataacttgttagaagctgaattgactgcctttctgggctatgatccctatgccagaaatggctggaatactggcaactctagaaatggtgcttatttccgcaaagttgatacgcaatttggcccaattgaagtgcaagtgcctcgggatcgcaacggtcaatttcatcagcacacgctgcctggctacaagcagcactcggatatcttggaaagcatgattatcaagctttactccaagggcgtgaccaccagggaaatagccgatctaattgaaaagatgtatggcagccattacattacagtccagctcaggtatcaaatatttccaagcagatgattccaaaggttgaggcttaccacaaacgcaagctaagcgacaagtttttctgcgtctatttggatgcgacataccttcctttgcgccgagaaacatttgagcgtgaagcagtctatattgccattggcatcaagcctaatgggcacaaggaggtcattgactactgcattgcacctagcgagaacattgaagtctggacagatatgcttcaaaacatgaaatcccgaggcttaaagcaagttgagctttttctttctgatggtgttgttggcatgaaaacagccttggccaggacttatcctaaagctcattttcaacgctgtttggttcatgtcatgcgcaatatctgcgctaaagtacgcgtcgacgatcgtgaaaagatcatgaatgaattcaagcaaatccatcaacagccaaataaagaagctgcgatcaaagtcttgcacgccttctatgacaagtggaacagagcgtacaaccatgtcatcagagatctcaaagagattgagcctgatctgctggtcttttacagctatcctaagcagatcagggcttcaatttactccaccaatatgatcgaatcctttaacaacgttatcaagcgtaaagctaaacctaaagcagagtttccaaatgaacagtcgcttgatacttttattggcattcaagcaatgagctacaacgaacgctatttcaatcgaatccacaaaggcttcggtcaggttcaggataccttagaatcctactttgattaaataaaagattaaaaaatcaatctacgagaaaaatctatttacacaaaagatttgacagtttcctcgaaacacattgcttttaaatagctcttttaaactcatacttctcctccattaatcattaataaaaatatttatcatcctttaatcttactacacaaaaataattttttacacatatttttttaatttttaagctaaatcatatttcataaacataaaataagactagtaatcaattcaaattgactactagtctctttgtttaccaaaaactacatttttcgcaaaacgtcgatcaatacacgacgtaagtcttcgttcttcttacccatttcttcgatcaatctagctttatcatctaaagcctgattatatttatcttgcaaagcattatatctttgctccagttgattgtaatttctgattactgtattgtagcgttcacgcaaaccgctagcttcatcaaattcataattattccgattatcataattatttcgattattatagcggcggttagactgattattacgtgagcggttattattttctcttctgatctcaaaaggatgcttattttgtcgcttacgttgattttgcgtttgattattattatttcgattattgctattcttctgattattcttacgctcaaagtccttagattgaccttcacgactttcattctgatccttagaatgttgctcaggcttttctttagtttctgtttccttattttcagccgctttttcagcattcttgcgatacttttgatcaatcttgatattttgataaaaaggactaagttcagctataactttttcaccatcttcaaccgaaaaacttccccgcttgttaactggcttaataaagttggtcttcacaattgaagcaatcttatcctctaatttcttttgaatagatttatcaatcttatcattctttataactttagctaaaatcttacgcttagtaattgtcttaacccgcttagatttagaagctggcctcttatcagtagcatcctctttagctggggcttccttagcacgacgttcaattgcatctgcgtaatcttgtacattaccaataattaatttagcaacagccggcttaaaatattttcttcttcgcacagtaatacttggttgtttacgtgtacgcacaaagttataaattttaatctttagtttttgttgtaattctttacttgcattaggcaacaattgatcaatcatttgattcattgttaccatttcatttaaatcaatattttgttgttctaataatgtttgctctactattcctggcatttccaatcctatattcttttaattttttcacaacaaaaagggccattacggcctattttgcaataatacatcaattttctcattaataaacttaatgcactttccattttacaacattaacgctatttacgaaaagggctacaagcatattctctattttttaaccaaaacaagcagcatcccatcgatactgctttattttatgcgcagttgcactagactttgactctatttctattttacgtgctaaccagccttttttctagttttattttcttaactaatccattaggttttacatataaattcttaatattatttcgctattataagatcaattaagatgaaaggaatgagaaccttgattaaactactcttaattggttgatcatttttaacgcttggtttaatggccatcagctcagtattaattaataaaccagcagtagcaaaggtaaaacatcgccactaaaaaccagaataatatatgttaataaatcttttcccctctaactagaaagaccaggttatgtactccacatagcctggtcttcttttcgtcttattctttatggttggtagaaaattgcaccttggtcaacaattacatctggttgcaacttacgtaaactcttactttcaacacaatattttgtattattcaaatactctttgaagttcttagtttccaagtgctgcttgtaagcttcattattacgataaacttcaatagctaaccattcatttggttgatcggcaacagttcctgcaatcattgccaaaatatctttttcttcttcgactgccgttttcatttctttcattacagcatgagcaaactcatcgcccttacctaaagaaacaccaatttcagtcagataaataacataatcatttgatccggtaactgctagtttttctgcctttgtagaaataaattccggaaacaattctacctttactcgactagttaaaatatctttagcaacgtcagtaaaatccttaaattgctttgaattagcatgagtatcataacttgcttcgtcttgatagcattctactacaaaattagtagtttcttcgtcatgacttgtctgcataaacaatgtgcctggttcgttttcttgagaagtaagcatattatgttgccctgccttaacgaactttgcatgatcctctttattagtttctagtttatataaacgcaaaattggtgtttgttttaatttcataacttctcctccaagaattaattttgtcattattatactaaattttatcgcgtctattagtaaaaaacatcccttagttaagggatgtcacaaaactataacgtgtaattaactttcttaaacttgtagtccttcatttttttagctaatttcttgcttctgaagtagttaccaccatcatatctactagaataaaccagcacgttatgctttttaccattaatggtttgtggtaccactcgataaagactccaattttcaaaagtaatccacggatcaatctcatagaatgtatcattcttcattttggtagttttaccagacatccagttttgcgttaccttatcaaagttcttctggttagcaattctaccattgaagtaatcactaattgtcgaagcctcctgggtaaatattggtttgccattaacagtatgttcagtaaaggtgatctttgtgccattatgtgcattacgatcataagagtaccaagtaccctgcatcttttttggaatagtaacctgtacaccattaccataagttgaagcatcaacagtctcaacttgactagccaaaccagttaatcctaaaacaagtaccattgatgttaaaggtaacaaagttctttttagcataaaaatcatctccagaatgtaaaatatatgagtccgctttcataatatattttacagtatcttatagtacttagacaagatatttttaactttacagattaatattcttgctgcaatagctttataaactcactacttaacgctgaatttgacttataaaaagccattatcttttgctttattaactgaccatgatcaagcaagaaaagtggctgcaaatctgtagtattaattaacctagccgtattctcatttaaaataaaatagccagacctagaggcgaccaacagtgctgcttcttcgaccgagttagaagcgatgaattgactgccaatttgatacaaatctttaaataaatgtagctcactaacctcttcttcaggtttagccacaataaaacaagtcatatcattgagctcgtctttttcaatcatttgaatgccattaggatacattcccttgggcaaaattgccattacaccagcttgagtcaattctgtttcatcaaagttaagattctcgtcacgcaaatcattgattgctatgtctgcttcatcttcattcagttttgcaaaagcaccatcatgactagtcgcaagtagttttacatctacattaggatgttttaacacaaaatgctgcactgcctgatctaattccttacgacctaattggtcaaaatatgcaatctttaattccgtcattttatttttcatccagcggtgcgtgtccttcttctgctactcttcttttatccttagtatcttcatgcttattaagtgccatcaaggcaaaaaagatcaaattcaaaccactaactacaatgccaaataattttattaaattgagtttcttttctttactcattttttaacctcacaactaaaaataatcataaaatgatacatcgcctttaacgaaatctaattttttgatgcggtaatctgtaattaatcctagtttaacagcagcattcatggttagtctacctaatagcacctgggtccacgcggtaattgatcccgaaaaatcaaccaatgcatcttccttacgttctaccgctaccttacgtccatgattacttaattgccaaactccaatattccaaggacactgttcatcgctattgacttccagattaaaatcaccttcttgcattggccgcatacaagccaaaactttttcaaaatcaataattcgactcatcatataaggacgcaaatcaacttggagttcgttttgttcaggaaaaagttcagctcgtaacgatttctctggtacgctcattttaaattgcttaacactgcccgcgtgcgaacccataaaaccaaacatactcaataatccctgcggcgtaattgcgtacatttcatcagctaaaaaagtattgtctctaatgcgataaatcaagtaactaattggccgctcatccgcgtcaaaataaacggctacattgcggtgatgataataagaatcaagtctattccaccaccatgcctcacgtacaaccgtgttacgttcatcatcagtatgcagttgacgttcataaagttgaatcacaccattttgaacagctaaattgtcccacttgccacgcactatatgaccagaacgtggtaatttaaaactacgcaatgcgcttccatcaaagcgatattctttttgataaatactattgctaaacccgtactggcgataaaagctctccgaaaatggtgccaggttagcaaacggaatatcttgcctatgtaagtcatgcaaaatttctttcattaattgggaaatatgaccttggccacgatactcaggatatgaagctacataacctattccagccatcggtaaatgatgcccaaaaacatcacttttaaatcgattaaccataatatagctagctaatttttccttatcaaaatagccataacctgtactatgatcataacgactcataaaattttcgtctttagtcaaatcattatttttcaaaaatgcatattgaattaatgccgtaatttgctttaaattattcttatttttctttaattccatgcttattcctatacgtacatctataaatttattcattactattttagttcattttttaaatttttaactagatttttcataaaaataaaccggaatcataaaatcccggtttattttacgcaacgtattcttgataaagctgagagataaatgcctgcatctgttccactgaatgtctccggctgcgagcacattctttagcagggcgatcacataaaaagcacttacgtggctgcctgcccaaatctctgcgtgaaattgcagcttgtttattttttaccaacacgtctgcatcaaagagacgtcccaatgatatctgattctcaaaatcaattgttgagcgctttactttttcaattgacaaagataatacataaaagttttcacagccactatcatcattaagctgtgtcaccaatttaaaatgataacctaggttagtccaagcattttccagctcattgatacccaacataaacattttagttaaatagcgattattcttgattggtcctgggatattcatattaatgtcgactagagtttgattaggatacttattaaaaatcttatgttgtacagctactcgcctatctttagctgctaaaacttgggcaatatcctgcttttttccttcattaaaaatattcatttttatcacccagttaattataaatgattgtgccgactccgtctgctagtttgttggcattgctcaaagaggtgataattgctaaattacctgttttttctacaaattcaattgcagcttctatcttaggcttcatactcccagctgcgaaataacctgctgctagatattgtttgagctgttcaacttttattttaccaattgcttgttgattttctttgccataattcaaaaatgcatgatccaccgttgttagaattactaattcatcagcgttgatatcttctgccattttagcagcggaaaaatctttatgaattacgccggcaacacctctgagatgcccatctttcacaataacaaggatgccaccaccgccacaggcaatcggaataaataaatttcctaaagtagccgccatcactgctttaattgaatgcaatcgattttcagcttctgtaaattgccaagcatactttgaattaaagacctcatcagttacttccatctcatttaagccatatttttcatagatttcttctcccacctgagttgttcgatcatgaaaagctgtcaaacaatgcataaagatcaattggtcatctggtgtaccagtcatttgcatcattttcattgtgaccgtatatggctttaataatttaattcgttcagaccaatcattttcacccatcgaaacccaaacatcggtataaacaacattggctcctttaacgccttgagcaatatcatctgtgatcaaattttttgaacctgaatcttgggcaaaattttgagcaattttttgtacatcaggatgtgtaaacaaaggcttgggtgtaacaatatgtacattaacacctaacattgagccacaaactaaaagactgtcggcaacattatcgcggccatcacccacttccaaacaggaacgccagaatatttagccagctcttctacatcttcttgagcaaaaccgcgatattcaattccatcatacattgagcctaggactttagccgtatccttgacgctttcttttttacctaagtggatctcgcttgcgcctagatattctggatgagcacctaaatcattacaagctactacaaaagcagatcgcgtcctagttgaggctttttcaaaaagtagtgcaatatttttacctttcagatattcatgtgggatatgctcttttttaagttcttttaaatgtaatgcaaaatcaattaaatatgaaatttcagctggagtatagtctttacaatcgagaaaacttctaccttgaaaaacattttgtaaatatttcattttttgcctcttataaatcttcacgaatcaacggacacgacatacatctaggaccgccacgaccacgtgagagttcactagaccgaatctcatgaacgatgatgccatgttttcttagcaaatcattggatacataattacgatcataagtaacgacttcacctggtgcaattgccaaggtatttgagccgtcattccattgttcacgtggtgcggcaattggatcaccaccaccagttggaattaaatccaattcgcttaaatgtaagttttctttcaaaacctgcaccaaatcattcttttctgtgatttttacaccgttgtgatcatcgggctgtagaacataaatatcaattttgccggctttatctaaaataaagggatgaaccgtaaattgattataattaatcattgtaaaaactgtatcaaggtgcatcatagcatgattgtgcggaatcttaatcgctaaaatcgtatcataacttgaatgatcaaataaattatgagctaagtcagtaattgcagttgcagaagtgcgttgtgaaatacctacagctaacacatggttatttagaactagttcatccccgccctcaaggcgaccatgatgataacggtcacgccaaactggaatagttgcgttcttgaaatcaggatgatttttcaaaattgtttccataaataatgattcacgtcgtctagctctgaaagtcatccggttaatggtcatccctgaaccaattgcagcctgttgatctcgagtaaaatatacatttggcattggatcaagataaaaagggtaatctgggtcctcagccaaatctgctaaagatggggtagaattatgaatcgcactttttctaattccagcaatcaccgtttttaccatttccttagttagcaattcttggagatagttcagcaataattgatgcaaaggatcctgttttttaatacttgattcatccagtaactgatctaagaatgcccgacgaactttctcatctgttaaagattctgctaataaatcctcaagatataatactttgatcccctgctgcctcaatacatgcgcaaaagcatcatgttcttcttgggcaatcttcagataaggaatatcgtcaatcaacattcgatgcaaaatatctggggctagattttctagttcttttcccggtcgatgtaacatcaccgtttttaacttaccaatttctgaataaacatgaatcggactcgacattcaaccaccttctattaattattgtacccgtttacatttattatggatcaattaggtaaaagttacagtattatcatattgcagcaatgatttttttcattaaaggtgtaacttgatgatctttacgccaaaccagctgcaaatgtgttatccaattagcatgtttaattgcgatcatattttcttgggcataagttgtcgcaattgattctggtactagcgctactcccatttttctcttggcccaagtaattgctgtccgtgaatcatcacacttaaccgcataaaatggtttaagcccatgatgtgcaaaagtttgattaaaaatatcctcaaagcgacgataaataatcaatggctgatctgctagatctttaatgcgtaattcttttttttgctgaaaatctgggtctacactaatagccatcattttttcagttgttaaagtcttagtatttaaacctgtctggttgtaaggcgttcgtacaatgcctagatcgattgtctttttttctaatttatccaggatgccataagtattatcttcataaatatcaaaagaaatttccggataatattttcgtaattcattaaaagaattcattggtatcaagcccgttgaggaagatgccattccaattgcaatcgttcccaattcaccggaaatagtcttatgtacttggttttcagcattttgagctagagaaataatttcattggcatagctttgaaaaatttgtcccacatcagttagctcaataccatgtgccgttcttttaaataattgcgcgcccaactctttctctaattgttttaattgatagcttaatggtggctgtgcaatatacaagcgcttagcagctgctgtaatctgcttttcttctgctacaactagaaaataacgtaactgttttagattcatattatttatcctttttttatttcaattgatagtgatattaaaatatttaatatcttatattgtattttagtattttattcatagcaatatctgtgctaccttattaaggtagatttggagggaaaataatgtctgataaatttcacggcttaactcaagccgaagcagacaagcgcttaaaagaagatggcttaaatgaagtaccagagcctgaatacaatttctttaaagagttcttgtctaagttatggaacctatccgcttggattctagaagctgctttaattctagaatgtatcttgggcaaatgggtccaatcattattcgtgttgttgatgcttttatttgctgcatttaacggtgcatctaagaaaaagcaatcaagacgagttttaaataatatttcacacaagttgactcctactgtatcagttgaacgcgatggcaagtggatcaaacttgattctaaacaactagttaaaggcgatttaatctcacttaaacgcggggacgtactcgcagcagatgttaaaattgttgacggtaacttagcttgtgatgaaagctcaattacaggtgaatctaaaccagttaagaaagcaattgatgacaccgcctttgccggtactacagttgttgaaggtgatggcctagctgttgttactgctacaggtaaagattctagaagcggtaagacgattaatttgatcaacaattccgctgctcctggtcacttacaacaacttttgactaagattatctactacctttgcttactagatggtgttttaaccttagttattattatcgcctccttcttcaaaggcggtaatttcaatacctttattaatatgttgccattcctggcaatgatgtttattgcttcaattcctgtagcaatgccatcaacttttgctttatccaactcatttgaagcaacccgcttaagtaaagaaggagtcctgacttctgacctaactggaattcaggacgcagctaacttgaacttgcttttacttgataagactggaacaattacggaaaacaaaactgccgtagccgcttggactgatctaagtgacttgcctgacaaagacgtgcttgctttagctggagccgcaactgataaacgtaatgctggtattatcgatacagcaatcgatgaatacttagtagaaaataacattccagtcatgaatgctgaaaactttactccatttacttctgacactggttattctatggctgatgttgctggacataatgtaaagcttggttcatttaagcaattatctttgatcgataaacatgccgatgaagaaatttctggaattaatttcaaggcaggacgctcagtggcagtcttgattgacgataagttagctggtgtcttcatcttacaagataaagttagaacagactctaaagcagctttggctgaactcaagaaacgtggcgttcgcccaattatgttaactggtgacaatcaaaagaccgctgctgcagtggcagaacaagttgatttaactggtaaagtaatttcgattcacgatttcaatgaaaatactgatattaatgatttggccggtattgctgatgttttaccagaagataaactcaagatggtaaagcttttccaagaaaaaggctatatcgtagggatgacaggtgacggagttaacgacgcgcctgcattaaaacaagctgaagtaggaatcgcagtttcaaatgctgctgacgtagctaagcgttcgggtaaaatggtattactagacgatggtctaggctcaattgttaaaattttagacgctggacatcgcgtataccaaagaatgactacttggtcactaaccaagcttgctagaactgctgaattaacgatgctgttaacttttggctatcttttctttgactacatcccaatggccttgaatgcaatggttatctataccattatgaacaatatggttacgatgatgattggaactgacaggactcacattacttataagccagaaaactggaatatggctaagcttgctaagatcgccttttcactagctgctggttggactttaattggtattgggtttgtttggttcttaaacacacacggttggagtcacggtgctgtttctactatggtttacgtatacctagttcttagcgcaatgttgattgttttgattactagaactcgtaagtacttttggcaagattacccatccaagttggttggtagtgttcaaattgcagatgttctattgacctttatcttagctctttgtggttgggcaatggtccagatttccattcaaaacttagcaattactgtaattgtagcgattattgctgccataataatcgacttaatttaccaacctgtgatgaaaaacaggtagattattaccataaattttataaattaaaagacttctaggaactttgaactcttagaagtcttttaatttatctttttgattcacgatatcctgctgcacgtgctgctgctttactcttgaagaaaactgcattttcacgattcattcgataattatgaccgcgcattacgtgaaagatttttgatcgtttattatcaacaattctgtaattactggtataaatcttagttttatcacgatattgatgctttctccttctgtgatgaatagctgcattaacaactgatgtcgacccctgcaaatttgcaggcagaacactgatttctcccactaacatcagaaatgcaacaatagtcacaacccaattcttgcatcttttcataaaaacactcccttaatatgtcactatatttatatagtatacgtttatatatgaagtgttcctacgtttattagaaactagtttgaaactgtcaaatcttttgtgtaaatagttctttctcgtaaattgattttttaattatttatttaatcaaagtaggattctaaggtgtcctgaacctgaccaaagcctttatgaattcgattgaaataacggtcattgtagctcattgcctgaatgccaataaaagcatcaagcgactgttcagttggaaactctgccttaggcttagctttgcgcttgatcacattgttaaatgattcaatcatgttagtcgaataaattgaagctctgatctgcttgggatagttataaaagaccagcagatctggttctatgtctttcaagcttctgataacatggctgtaaaccttgccccatttggtatagaagtcatgcaggacagctgtggcttcttctttgtttgtctgttgatgcacctgtttgaattcgttcatgatcttttcacgatcgtcgacgcgtactttagcgcagatattgcgcatgacatgaaccaaacagcgttgaaaatgagctttaggataagtcctggccaaggctgttttcatgccaacaacaccatcagaaagaaaaagctcaacttgctttaagcctcgggatttcatgttttgaagcatatctgtccagacttcaatgttctcgctaggcgcaatgcagtagtcaatgacctccttgtgcccattaggcttgatgccaatggcaatatagactgcttcacgctcaaatgtttctcggcgcaaaggaaggtatgtcgcatccaaatagacgcagaaaaacttgtcgcttagcttgcgtttgtggtaagcctcaacctttggaatcatctgcttggaaatatttgatacctgagctggactgtaatggctgccatacatcttttcaattagatcggctatttccctggtggtcacgcccttggagtaaagcttgataatcatgctttccaagatatccgagtgctgcttgtagccaggcagcgtgtgctgatgaaattgaccgttgcgatcccggggcacttgcacttcaattgggccaaattgcgtatcaactttgcggaaataagcaccatttctagagttgccagtattccagccatttctggcatagggatcatagcccagaaaggcagtcaattcagcttctaacaagttattaacagcctgttgtagctctttgcgcaataaatcatttattttgtctggattgaatagagcttgagcaaaatctttggtaaaatcattcatgaaggagttcttctttctgtatgtgtttttttgttcaaaccaatcatacgagaaaggaactcctttttctaatgtttaaagaaataaatttaaggaatcattcatccttacacaaactattttacagtctcactagtttaattacttatcttcatttgcaccaaaaatatccaaaaattgtaaaaacaagttaacaaaatcaagatataattgcaaagcacctaaaactgcaagcccattagttgaaagatcatcaccatattgtaaataaatatctttcattctttgtgcatcccacgcagttaaaatagtaaatataatcacagcaataatcgaaaaaacgtagtcaatgattggattatgtaaaaacaaattagctaacatggctacaatcaacccaattaacgcagcagaagcataagaccctattcgactcaaatcttttttggtaattgttcctaaaatcgccattgttacaaagacggttgccgaagctacaaatgctgaagcaatattttgtccactatatgcacctgcaataaaagcaaaggtaacgccgtaaacaattggtgttgtgcaataaaggcagagataggtcccgcaaaaaccgtcattgtcaaataagcactaattgctgaaacgaaaaccgctaaggccatataaccatatattttgctaaaaaacatttaatcctgaatcattagcatattgctgttgaccagattcttgatcaaaattatccatcttaatttctccttcttaacacataccctgtactttaaatataacacctgtttaattaaaaacgtagcgagacaccctaccaaaatataaactatctcggtcactttggactagacctacaataaaaaatatcatataattggtatagacaattatcaaaaatgaggtactattatgacaatgagatctttaggtctgtcaatttatccaggccacagcaaatttgaaggcaacgctcactatctggacttagctcacaaatatggcttttctcgtatcttcatgagtatgcttgaagtacaaggcagccctgaagaaaccaaagctaagtataaaaaaatcattgaatatggcaataaattgggatttcaaacttttttagatgttaatcctgcaatcttcaaacaactaagtgtcagctatgatgacctgaaattttttgctgatattggtgcagcaggcatccgtcttgacacaacatttgatggtgcaattgaagcaatgctttcttacaacccatatggtctaatcattgaactcaacatgagtaataatgttgactatcttaacaatattatttcttaccaagctaatacaccgtttatttatggctgtcacaatttttatcctcaacgcggtactggcttaccttacgacttctttatcgcttgttctgaacgcttcaaaaagtttggcattcattcagccgcttttgtctcaagtcaagtaggtcaaatgggaccttggaacgtggaagatggtttaccaacgcttgagcaagaccgtaatttaccaattgatgtgcaagcaatgcatctctgggcttctgggttgattgatgatgtaatcatcggtaatgcttatgccagtgaagccgagttaaaagccttatctaaagttaatcgctatcaattgatgttgcacgtaaactacgttactgatgttaataagattgagaaaactatcgtagaagcgcctcaacatttccgtcgtggtgatatcactaaggatgtaattcgttcaaccatgccccgtgtaacttatgcagatattcctaatccagtacacgacaacaatgtagaattccaacgcggagatattatcattggtaacgacaactttggtcattacaaaaatgaactacaaattgtccttgaacctcataaggagtcaaggatgaacaaagtcggttctattagatcagacgaattattcctgctcgactttattaaaccatggtcaaaatttaaattaatcggtaacaaataataaacattctaagctaaatagtgaattagttatccgacgggataattgattcactatttttattcttttgtagaattaaagtagtggtaaaacgatatgccctgaggtctttagacacttgatgtcgcataataaactggcagttttacttaagttttcaatagtctcttcgaagaatgtggacactagatgtcgagtttagaaaattagatctgatttcttaagtaaatacgttttactactaagttttggaggtttttattatgcaagttacttttggaattgatgtaagcaagtctacttctactgtttgtgaactaattggtgaaagcaaaaatgaactaaccattactaataatcgtcctggttttattcaattgcttcatgaattaaccgctttttctaaacatccgcaaattatttttgaagctaccggtgtttattcacgcagactgcaggcttttcttgaagactacggctatgaatatgttgttattaatccgcttaaagccaaaaaagagatgaatatggggctacgctacaacaagaccgataaaactgatgcttatcatttagctttaattcaaagactttatcgccatccggttaatcaaagcgaatcccaaacttataagcagcttaatgctttgagccgcttctatgaccagctgacaagtgacttggtaatagctaaaaatcgacttcaccaagctctacaatcgacttttcctgaaattgaaaatttattttcttctgctaaaggtaaaaattactggcaaatagttgtgcgatatcctcattgtgacttagtaagaagagaagataaaaaacagcttattaactggttaatgagcttaaaggggattgcttttaaacacgctctaaggactgcagataaattaattgaattagcttatcaagcttatccagttgtatcttgctctagcatagaagtcgagcaagtgcagtattatgcacacagattgcttaatttaagtgatcaaagagaaaatttaatcgcaagaatggttaagttagcgaagtctttgcctaatcatgatttagaaaacctagaaagcattccaggctttgcacagaccactgctgtcagagttttagcagagttaggagatttacgcagatttagtaatcctaataaaatcaatgcttttatcggaattgatccaggcagatatcagtcaggagaaatggactctaatttaagtattactaaacatggcaatgcagtcgcacgtaagttgctttatcgagctattggacaaattgataatgcagctaagacaaatccgtgtcatatagcagattattatgaaagcaaaaagctatcctctcaaaccaaagggttcaaaaagatagctattgcttcaattcataaactaatcagaaccatttatgccctgattatcaatgatcaaccatatgattacaacgtagccacacataatcaaaaagactttagtcgtaattaattgatcaagtacattataacgctaagcccaaaaatcagatatggatctgggcttatttgtcgtgtctaactaaaaaaataaatcgacactaaaagatgtttaagttgaaatttaaacaaaaaatgaagccaaacttcttattatgcttgactttacgtagaaaaagacctaaaagtgtctaacttttaggtctcagttcaaattgatttaattccctctttttatttattctattttaagcaccatgatattgaacaagtgaataaatatcaacatcaggtaatttatctctaccgtgtaaatctggcaattcgatgtagaatgcggcaccaactaacttaccaccaaggttttcaattagctctttagaagctcttaaagtacctgcggtagccatcaagtcatcacagacaaccactctttgtccaggtttaatcgcatccttgtgcatttccaaactgtttgaaccatattccaaatcataggaagcacgttcaacttctcttggtaacttatgtggctttcttgcaggtacaaaacctaaacctaactcagtagctactggacaacctacaataaaaccacgtgcttcaggcccaacaattacatctgcttttttactctttgcatattccgctaattcatgagtagcggcacgatacaattcaccatcttgcaaaattggtgtaatatcgcgaaaaacaatgcctttgttaggaaaatccttaacacttgcaatatatttactaaaatcaactgccataagaagcataacctccaaaatgctctgtgtttgtgttcaaacgcttttgaccagtatattttaacaaattttaacgataaaagcactgaaaacagaatagttatctatttatttgtcaaattattaacatatgtaatcaaacgttgactaggcatagttcttagttgattaacaaatttaatctgagaagaagttcccattaaatatttagaagctgtcagcggctgttttttaggagaaggctctcctaccaatttaccttcatccaattttacaaagcctaattcaaagaaaactcgtaaaatgaaaagcacactatcataatctagtcccaaataaggtgcaactgtacggtaatctgctggctttaacgtagggtgactataaatatattttaaaacagcaccaaaataatttttagcgggaatttgttcaacaggcaattgatcaagcaaaaagcgtaaatagatttgttgataatctttctccaatgcagcatttaattcaatctgattgcgtggcacatctaataatgcaactgtttcaccagtttgatcataatctttaactaaagagatcttgtcttcatcgatctgtagtcggttgcgaacaatcggaatatttttttgatcaaataacaggtagcggtccgcgaaacccataacatatttctcttggcgtaagtcaacaactggcgttggcactgccaattttggtgaagcaaaagctagtccggtcatgattccttgtaaagaaacttgatttcgataagtatttaatgataattgaacaaaaatttgagaaataaacggcaaaagattattattcaaaaagcctttattaaatccaataactgataagttaccgccttttttagcaaccgtaaatttgacatgattcttatctttacccattttaaagaaatgagtgattgttggattagagatactaaagattggctgcgtgtcacctgtcccaaatggacctacttgattgatttgtgctagtgtctgcggagttaagccctgcataggcaattccatgtcatattttttagtctcaagaccaccttcaacatgaaagtcatcttcaaatttttcccgtaatggcgcaatctgattttcttctaatgataaaccacaggcaaaatcatggccaccaaatttggttaaatattgatccttgatcggatttaaagcatcaaacaagttgaaaccagcaaaggacctacctgagcctttaacctcacctgcatcatttttagtcaaaacaatcgtgggtttatgtgtcttttcaacgatcttattagctactaaacctaacacaccttcgtgaaattcagggtcatataaaaccaaagtattttgtttttgccagctatttttatgaattaacgtcatacatttgtcatagacttcggtggttaattctttccgtttattgtttaattcttcgatcttatctgcaattttttgggcctcaaggtcatcatcacttagcaaaagctcaactgccaagttggcattatctaatcgacctacagcatttaatcgaggagcaatattaaagccgacatcagtttcattaatactgcctaaagtcaaaccagcatttttgattagagcgcgcaagccaggacgatctgtctgattaagcatttctaaaccacgcttaacgataatatgcccctctccggtcaccttaaccatatcgccaatagttccgatcatagccaaatctagcagctcaggcatagtatcctgcattagaccacgacaaatcgtgtaagctactccggcaccacaataatcatcaaaaggatatttttggccaggataattacaatgaacagtagcataagctgccggtttcttttcttgaaaagtatgatgatctgtaatgattacatcaacattatgttcttgagcatatttgacttcctcgaccccagtaacaccattatcaacagtgataatcaatctggttccatcagctacaatatcttgatagcggtccatattaggaccatacccatcattgaagcgattaggaataaaataatgaacatcagcgcccaaaatgcttagggtttcagtcataatagtcgttgcagtaattccatcagcatcataatcgccataaattgtaatcttttcgccgctatcaattgcttgattaattcggttaattgccttatccatgtcatgcattaacgctggatcagccagattttcttctgttgcattaaaccaaaaatcaagtttttcgtctgtattaataccccgcaatgcaaaaagtttggctgcaatgggacctagttgatatttctcaatcaagtctggtgctaattcatcagctgttctttcttgccatttcattaattatcaaacaccttatgttctctcatcaaaacgaaaaggcactcattgttgagtgtctttattacaaaatctatttataattttatcgcaaatctaaatctgattaaagattgtaaatttttattttaatttaaaaaccttaagattattgttgttagccttttcagttttaatcagattaccccgaattgcccaacgattcttaccgccatcagcacaagtaatcaaagttacaatattcttcttagtattatcgactagcccaaccgcagttggatcaacaatctttttcatataaattcgatagacatatactttgttaagattagttaaataaactaactcaccttttttaacatcttcaagtggtgagaaaagaataccttttgctgtcatgtagtgacctgcaagaggataatttcccttacccattacttggtcggctcgcatcgtgccgccaccagtcgacattgcatcatcactcatccccaacataatcggtaaatacatattaacatcgggaatagctaacgcaccaatcgcaccagaagtctttttcacttgtgatcttgctgcttgtgcaatgcctaaagacttaactttactaaaatcatacattccttttttctttttgttttcttcaattgtctttctatttattccacttaaagtagattgttgattatgatgaattaattgatcactgatctgtttgttaaatatcaaagcaataccaacaagcaataatatgatagcagcaactctaagtaaaattgtacttacactattttttttatttttagccatttttatttaccgttgatgtcaatataaattcttgtactatcacgtctcatacgttaacttatagtccttttcgttttgatttgtcccaacagatcacattaaatctgctgggtattcagtagattttcagtagatttttgataactaccaaaccgcccacagccaagctgtgagcggtttttgctaggccgatcgacttgaaaatcctgcattgcaaccaaaatttattatagcacattatttattctcattttggcagttttctaagatcatgcaacttagctagtaggtgtaccctctcccatgctattttttaacttttcaggatctgcacgccaattttttagcgtttgatttggaccgccttaaagctatctataaaatcaggcgactttacaagcaccaaaaaagcttatatactgaatctaaccatatagacagtatataagctttaatttgccactagtgttactccctagtggctttttttataagttaatgcaagttttcggagaatttcatctaaaaattcagacggtacactgcatacatacttacattctctggctttcgaccgagaatcaattgaacgttcatgatccagctctaccctgccgtgaactggcaaaccttctggaatttcaacgtgtagtggaaattctttttcgttagtagtaatagcaaccactttgatcactcctccacacatcatattgaaatcatcgtttgacacgacaagcgctggacgatagcccgcttgttcatgtcccttggttgggtcaaagttcatcatgataacatcaccttgatggaagtcttttctgctgttcaaattatcacctcccttctaataaggacttctaaattaaaagacttcgcgcccaactggtccgccccagtcctcttctttggacttgccaggattttctttttcccagtcgctccaatattttttatagtcaaagcctttgaaaagctcttttaagctttcaggctctttttgttttttcaaaacgatttcattatttttgttaactgttacatcaaatttggtcggtaattcattgatgccggctttgcttaaaatagttttaggcagtcgtacggctagtgaattgccccattgtttcaattccacattgcacattgttataaatctccttacaagtcttaattaaacctttttatttagtatatacttttgtatctacatttgcaataaaaattaaaatataacgcaaaaaagccaccccagaggaacaatcccccgaggtggctttatgcacgacatttggagcttttacaaccccttttcttttttattatggataaaattacggataaattatagctcattatggctatctatccatctttgtaaagtttacagcacgatatacgcacggttgcccgtcacatatacctgcttgcctttgtgtagctctttaatctttaaaaagcgtccgactcttccctggatctcgacttttgagttaagcttcaagccgtagaccttgcctgcgtcagcctttggtgcgtccagggcctgggtgtgaggcagaacaatcttagcgacagcgtgttttgagtcgttatatgcgatagggttagcctttacgtaaacggcacgaccgtcaaagtattggttcttgccaaccttcacagcgccattttccaagccaaacacctgccacatggagccacacggttttagcttgtcagattcccgcttgtctaactttgaactggtgtagacataagcaccttttgaattagatactactgcgacagcaccaatattccacttcacaacgggatgcagagagagcgattctacgctcttgttcgttgatttgggcttagaactacctgaattagcctttaaatcgatcaagcagatattaccgtcaacgttataccccttatagttatcggtaaattgccagattgcaacaccgtccatggatgggaagtaattaaagtcagcggaatcttgacgacccatgactttatatgaagctacccataaacaagttccgaatgactttacaattcgagctgtgttgagccggttacgcaaaacataagcgccagcatagacaagtggcttataccctgcttccttgatcacttgcatagctgctatgacagcatcggtgtttgaaccgacagagccgttgacgtcgttgccgctgccctgctcccagtcgtcagcgatgtagctaccagctgggactccgtaagccttagccttttcaacggcatacttagcttctgcccgtgctcgtgtgaccgagccggaatggttggcatagaaatagcccatggttagcaagccatgagcctttgcagatttaatttgcgcttttgctttcgggttgatgtatccagtaccttgcgtaagctttacgatagcaaatttcgcacccgtgtagctaacgttttctttctggaagctggctacgtccacaccatagcttttctttgatacgattgagcttgacatctttttcaccgcctttcgtttggttttcaaacgatttgtcaaacgattcaaaaacgtactcgttatacgtcttagttcttgtcatcattgtcgtcacctgatacaaagccaattggttgggcgttggtatcttgtgtatcctcttgtttggcttggtccgctgtcatttggtcataagcatgttggacagcacccttggcgactgtttcggtcactggcttgttttcttgcttggcttgatcaagtaaggcttgtacagccttgaccttcttttcggcaccagaaatatccagcgttgcggcttcgcttacgacaaacttagcaatctcatcaatggtcattacttgctttggaagtggtttagccgactttttggcaaagtattcgatactagtagagataccgatacagatagccacgatagccaaaacaactatttgtgtgtaagcagttaattcagtgagattcattattgggtcaccttcttagtagtaagtacgccgctagtgatgtcgcccgtcttagcaggggtgtagcctactggcttatcctctaccgctggcttggttgcgtctgggtccttgaccatggtttcgtcttggatacctgacaaatagcgcacccacttggtaactgcacctttgatgtcttgtggcacatcgtccaaggttaaaacaccatcttgcacaagagtggtgtagtctaaaattctagtgtttggtttcattttcggataactcctttcgcaatttttcgttttccctgcgtaattccttattttctttaactacagcctcatagtcgtctactaaaaagctatggctgtcttgtctcgtatttctcttatcacttagatatgaagtaaacaaccccaacaggaatggagctagtacactaagtacgtctttaagaccttgcaagtgtatcagctcctttctcagtcctgtgggtcatactcataagcaatctgcataaggttaatgattgcgtagatctcaaaaacaatagcagggtggaatctgaaatagccggctccaacgatgtgaaagctttccgcaaccagcagaactgtcaagaatgctactgacacgcctagaccaactttgatgattaactgtacccgaatatcaaaaacaccgcacaaaatcaaaattagtcctgccatcaagccgatactatcgacccagacgttattccacgcaggtgctagacttggtgggtaaaaaaagtaggttcgatctatcagaaagcagaccgccaatgccgagattaacagccctgttttgatgaaattccagcgactaagcttgtggtgcaggttgagcttgcggtgcaacatagtcttcacctgtgactttcttgtaacctgctgcgtccaataagccttgttgaactaagccttgaaagtaaggcttttggaaaagccccatttgatagtcaagtacccacatttgtaaaaataaagcgtttaaatcagtcataattagttacctccgttttcttgcttgttagtgttttctgctggcttagtgtcactggttggtgtagcagtcttagcttgatctgcttgcatgccaaccagaatttgttgcattgaagccataaccttgttggcttgttcttgcccttctgcgaccttttgcaagccttgggtcaatgctaaggattgttgtgtttggacttgttggctttgttgcatggccttcattgcttggtcaaacttatcgttggcttggtcaagtgcggcgttcttcttatcaagttctgcgctcttcttatccaattcttcaatcttttgtgtagcttcttgcaagattgcggcttgaccgtccttggagttttctacccagccattaaccttcaagtcccagacaggatcttttaagctgtcgtctggcttttcaatgtgccagtgccatggaagttctggcaactcataaggcaacgtaattactacgtgatgcatttctgcgttggcagagtcaggatcactaaagtaataggtaaaccccttgttttcttgtgtagcattgttttcttgtgcgccagctactggtgcaacttgtgtttcgtcagccataattggctcctttctatataaaaagcccacgggaactccccgtgagcaaggttaattttttgcataaaaaaagcactcaatgagtactaatactataactgttcccttgataaatacttagtcatgatatccgatgctttgataagcggtgtgtacatcccatcaccagtattaggattatttatccaatgattaatgtcaacaatataatatggaatattatgttgatctaccacaacgcctgtgatttcacccgtagaagctaagccgcctatttcatccggtttattccattgaatcgaatcactattgatagaatagctataataagcatcaatgattccctctctagaccatcctactttatatttactgcaagttatcgctctgccaattaattctgtatttacataaccgacaataatttttgttgtagggtagtagtcttctttattaaacttcatgtgatctagcatacagccaccgcctttctggtggcggctctaagtacttggtataggtggattaacgggctaattacccccccctaagatttccgtacagtccgattttcgaacccatacaggaccatagacggtgctactatctctctcactgataattggcaaatccctatttctgccaactagatagccgtttttcgaagaagcgcatacgtccagttccagatctgcgttcattgaacagtaagtagtatttggaaaatccgtaaaaatggtacttatttgagctccttggggaattttgacctttttagggaacataagataatcatttttattgaagatcatcttttcaatcatagagccaccacctttctagcagtagccctaaacgcttgacgcaagttggttagagggctaattaccccccctaatttttccgagccatcaagttttaaccatttagaattatcttgatcagtcaaaatatatgtgccgcttggcgcattaccagctgacccattaaatttataagctgctacaattaaggcattttctaccttggttttagccggcacattgctataatccgcagcagtaaagttaaatcccgctttaaccgtgtggtaagtatcaagcgacgcagtgattcttttaccgatcagtgggcggttcgtggagtcccaccattttaatttgttaaaaatcatgtgatctagcatttaagccacctccctacgtgggtagaaaagtgacctaagccgttgatacaagcgtataagtgaggtattccccccccagttttcagatattacggcatcagatttaattgcaatgggacctgcatcagttcggatgatataaatttttccataatttgaaattgaaactcctatgacgccgtaggtgccgtgacctatatttccaattggcaaggcagtagcagtgtcattaattttaacgttttttggaaatgcttgccaagttttaccatctatctctatgctttcagcatcgtctttaatgttgaaccacttcaacctattaaacagcatatgatctagcatgttttcgctcctttcctaattgaagagaaagcacgttcaaccattgatgcaacagtatgtagaaggtttttaccccccccattttgtacttttaacatctgattcacgaataagaccgaatgacacaaaattaacttcatatctatgatcgtcaaaaatgtattcttcatcaaagctcaagtttaatgtagcgttattttctgtgctttgacccgttccattaaaaacaccagtaactgcgtaacagtccgtaattttaccaatgacattcgcagtagtgtcagaatttagcataattatggcatcgggtgcagaagcagaaccatcaccagaaaaagtcgcaatttttgccccttgtggtaagactacttgtttaggaatagcttcccaattcttgccgtttgcggtcacgctatcagtattgtcactgatgttgaaccatttcagtctgtcaaagatcatgtggtctagcatgctttcaccttctttctatctattttttcgatcaatgcaaagtagtttggatgatcattttcccattgttgagcttgcgcttcttgactagctgggaatcttctagcaattgcggcattatccttcaaccagttaacagtgccgatcaaatcagcatttgactttttcaagtcgttgatctggttttgcaagttggttgtatcctgaacggttgcaagttttttccatttaggatagttattgccttcccagtacctcaaagcaattgagtcgccacctgaattacctactggaatccaaatttgagttttagcgtttccatcataattaatgttgattagcgtgccacgcttatctgggtagaaatccggcacattaagattgccagagttacttaatttgtaagtactgattgaagaagcgtcaccaactaaatcatttgcattggcaacaccgggaatttcagttttagcgttgagcttattgatattcccgttcagtgtgttaaattgaccttttgcccagttaacgatgtcttgacctgcattctggtccatcaagatctgattgccgccgtgcaggttttcttccgtcatcttagttgtagcgtttgcgttagcatcaaagccgcgggcaacggttgaggtaacgtttacgttgccgcttccgtcaggggttaagccattaacctttttgactgctgagttagaaacactagttaagtccgtcttagtggcgtaattgccgatgtttagtccgtcaaccttggagtcaattaatttgatgatgtcattattagataatgtcggaagctgaaaccaatatccccaatgattattactaaaatagcggattgcatatttttgttggctggacactataagctggtatccagcattagcatccttgactactttgattaatgcgtttttccagactattgggatattaaaaggagtagttccatcttgcattttagggtaattgacaaagctagcagcactttgggaagtccgatatgtcccgcttggcaggtcattgaggtcttttaaatctgccggaaaatccttaatgcggtcactatcaacgatcaagtcaagaataccgtcatcatcgggttcaacaaccgccccgtcgttgatctttgcacctttgaccttgccagcttgctcaattttcgggtcatactccgctttgagcttcaaaatagccgcgttgacatcgctcatgtgagctacgccaatctcgttaaccgtcaagtcaacttttgcggcattgctgatagccattgctaaatcaatgtcaattgaagccgttgaccggtgatctggcgaacctgccgctagtgtttgttctccgtttgacggtgatacaccaagcaagatttctttgttatcgttgttgtttttagcgtaccaaccgactgagctaaacgttaagtcatccgttaagtccttgttgccaaatgaagccgaaacggtgattgtgttgtcttgtggaggtgtaacaattacgttgacctccattttttgattttcaagggtggcaagctttcgaatgtcttcatcagccatagagctgacatcttgaccagctagcaccgcccgtgtatatgcaatttcgccattaccagcgccgacattaatgagtaatttacgccctgcatcggtgataatggtgtctttgaatttgtccattttgaccttctttcattagattgcctttaaggcttgatattcatgtgttaaaagcttggtaccgatgtacgacatgcgctttgcttgtgctttccaaccttcccaccaagtagccacttcttcatgtgtagtgttttgcaactcgttaatgtctgtcccaaaataccaatggttatacgtggtagctttgtagccttcccaccagatagacgcaaatgttttgatgtcatggtccctatcttgcgtggtggcacctagatagccgtgaacgtgtgtagtagctttaaagattatcaagtcaagccagtaacccatcgccagcattttttgcaagttgttaagcataaacttttccatttgcgggttttgaaccgcatcaaacggtatctgcatccctacgtgacgaatacctgtcttccagattttgaaaccgtggtcatattcaagcgcactagacgttattttcacgattgagggtacagtaccctgtgcccgtgaaagaagctccataacgtgaataatgaagcgataattgtcgtcgtcttgacttggtctatatgtctggatgtcggcaccaaaaaggtcgagcgttgttccttgggcgtcttttaaagcacgccagcgctcgaccttatttgcatttgtactaatcccttctagtggctcgttaaaggcatcaattagcttataaagattgccaccaggtcgcttataccagtagtctgaaatctcagctaaaagctgttcagaagtctcatatgccatttacgaccacctcaatatttctagtgtcacaagagacggcttcaaacggctgtgtatgtatatctttatctgctaaatgttcggggtcagttccgatctcaacgagtgcctcaccaacgccctcaattgaatagatagacggataaattttggttaggtaaacggtaccgtccatcagtaaactgttgatgtaatcagctatttcttgctttacatagtcagcaccgtcgtcggcgttccattcgtcagttgtccgaattttgacccttgcataaattggtttgtcggttgcgtaatcaaaattgatctttttaacctcacctgttgcatcttttgcttgaacttctttgctaccagtaagactgataccagccgctactttatctgctaagcaactcgctatatcgtcttcttttccgcccaaacaaaaaacgtgaaccgaatacggtggatttccgtattggtccgcgtctgcgaacggattttcaataatgtttacttgtcttactcctggtaaattcattaatgctgatttgataccagctgttgacggtccaggctttgccacgttttccatgattagccgcgctctatatgtggagtcgtcttcatcatcttgtccgccagctgccttctgcggattcgtcacactaataatgtcttcgtccggattagaaacaatagtgattgtgttaggcaaaacgttgttaaagtcaccagtttcaacggattggacaactcctactccaatgtactgaccatttgaatcttttgcggtagttacgtccttgataaggtcaaacacaacaccgtcatcggtttcaaactgttcacctgcttgtatcaaatattcgtcatcagtcacgatttgaatgtttgcaaagcttggtgtagcaactttccttggaagatctaggttagcaccaatccgatcaagtgagctttcagtagccgtgctgatataagcagaatagtaagttttttgcagttcttgaattagcaaggtttcgcgccacgctatcagtcgggcaataattccaaaattggaattacttgtcaggacgatatcggtgccaaaacgttgcatcaagtcatcttctacactgtccagtatttcttcatatgtgggagctaagaacccccgcttgtgtagtccgaaactagctatcgccaagttcaaaacctccctctacgtttttcggttgaccatcgccaacttgaacagttgcgctaaaagccacatataagcctcttctaggcattttcttaaaagtgatactattaaccgttttgacctctggaaccttttctgtgatggtcgtagacatgtcagcggatgcaagctgagcgttaaaattcttaccaatgaaattgctgtaatctgcgccttgatctgggtcaagattaggcatttcaccgtagcgaattaacagtgtagcccttattctttgggctatttcgtcaattccttcaacgattgctaagtcgtgagtagtagggtcaataactaaatcaccgtactcattaactaataaatccttagccatttttcgcatcacctccgagaactccaacaataatcgcatcattagcatcatgaacccttgaactattcggagtgtaagtgttgacagctctaccaccttcccagttgtcattatcacggtctaataccaccgcaactactgggacgccctttctcataagcttctttttaggcagcttatcaaccaaatgcgaacccgtttcagaatcaattcttttaaattctggtttaagtcgctcaatcatttcatccaacatgtaacaattttcagtaaccggaatatccagatattgtgctgatgtttcgccgtcgcttgaattagcaagcggtaaaatatccgccgtatgatctttcttgttatagtcaataacttttgcaattaatgcattttccattccagaaataatgccccattgaaatttgcgcattgcgttgatagccgccttacgttcttcattttgtgattgtgccataacactcacctccttaaatctttccaagtgaacattgcgtttgtgctttatccatgtcaaatgtatgttgaccggctttcacataaaaatagcctttcaaatacttactttccatgtgaatccccacgttggtggttatgtctggaaccaatggaaccatgatttcccacgttcctttaccggagctgtcatcgctactttcgttgtaacttggtggctgtaacaggtcttggccatcaatctcataccacgttctctttgtgctttttggattaatgatttcaagctttccttgaatgtaggtcatgattgaacctgtttttttgaccacctgtttaagcagtgttaatggtttgccctttgcggtaaatgactttttcaaagttggattctttgctaagtcaatcttagaaattacgattcctgattgacttgcaattcctttgatcaaagtcttatagtccgtgcctttgcgaaacgtcttattaactttgactacttttgtagcacgggttttaatccgtttcttacgccacttacctttaatggtttctttatatggcgttcgatggcgaaccgtgtacttctgtccttttttaggacctcgtttgtactctttggtctctgtgtaatggtggtatctagtaaccgtcttatcaggttgcttgacccacttcgttacatatttgttgaccttcttttcttttgttactttcaatttgcgagcggctacattgctgtaattcgtgccctcagtgaaagtaattgtaaaggtatcagttgtaccatcgtggttaggaatgccgattttttcgataaatccctcagcaagaatcttcttatctggtccccagttaaacgcaacatagcaatagaatttcttatgataaaaatttgcatgctccttggtcatgttgtacaaagtgaccgtattttgctgtggcgtagacgaatcagcaaagttaacttcaaacgtaaacggataattatgcttataatgctcgttgttgtaaacggtttgggttttgcctttatcgttagtgcagacaaaccacatgtgtgggttgctagtaactatcaatatgagacctcctgatccgttaaatcatcgctatcttcgtcagggtcataccccagtggtttgatagtcgggtcttcgtcttctgaaccaagtggatcaatcacatcaatgtaaatttgaacatcatagccaaactcagccttgccggcatcttttgcgttaccagtttcgtccatcactctcatatcaattcgaggtaaacgagtatcaggaatatcaatagcgactagctgattaagtataagcggctcctgttctagcaaggtttcgccattctgataaatagtgatggtataccagtcagcaacggggttatagtcaattcttagcgtgtaaacctcgccagccaattcgatgtcgaaaatgtccggcaaatcatcaatgttcactggaatatattgacgcatttcacccctccttacttaactcgcatcttgcttttagccttatgcttcttatcgttgacataaatcaagttgccggcataaatccggttaggattcttgatcttgttgaccttttgaagccaagaaaccgacttaccatagcgtttggacaatccccacagggtatcgcccggcttgatggttattgcggtgtagttcttgtttctgttgcctgccaacgtcttagaagacttcgaccgcttagcattcttctttttgccgcttgtcgtgatctcagcagctcgaacaaatgtaaaagttattgaaacctgcatcgtgtttttgaaaccggtaaattgccggtcaagttgtgatatcagcaagtgcttgtaataaatgtcaccacggaacgttaattcttcatggtgactgtgccacgttcttaactgcacccatttatcatgggctgtgcgaccgccgttaatgtcgtcagaaataagaccgtcaatagtgaccgtcttagaattgaatcttgcgtaatctttacgaggtgccccctgatcaacggcataagaagtaatgtttgatgaattgctttctgattccgtatttgtggggctaaaaaagacaatatcgctttctgtcccgttgagtgtaggaaaaatagccatattgccttcattcgtaaattcttttttatgttgttcaattttgctgaccatcgcggcttgatccgtggtcttgcttttattaacacgctttttgctggtcttagctggtttaagctgatttctatactttttgtatcggttcatgtctgcatgatattttttcatgtattcttcaaacttcttagtatatttagctttcagctttggatctttcgtgttaaagacttttgctgaaaagttcattgccgtcgcattggctttcattgccgcacggtgagctttatcagccttatctttgatttcttttatttttctttctgctttaatttgcgccttagtctttttgcgccccttacggggcttagacttgttttttggcttttcttttttagccaaataaaaacaactccttactaataaagcgatggatccgtacctaattcatcgcttatgtttactagaaccttattaatttcacggcgtaccagttccgcaatccgcttagcatcctcccttgtcccgtagataggaccgttgaggttgatgttaatgaccggcgctgagctgtgtgaccgtgtaggtctgttaatctttggaaacttaaacatttgcactaagtcagaaactttacgctttgtttgttcgtgactatcaactttaacaggaccgtcagcagtgattagctctggaccacgttcacctgcaataaatggagtgtgtgcttttggacgtccaccctttgcgtaaccgcgaccattgcctaatgctgacaagctagaaccatagcggtgcttagcataattcaagccagcgtaaatgttggcaggtccgttaaagataccgccagagcctttacgcttaaaggcttcgaatgttgctcgcttagtttgcataagtcctaatgctggaccagaaccgttaccgtctgggtcactccctggttgtcttgcgttaggattaccacctgactcagtttggatctgacgcaatactcttgcgaccattgaatcagaagtagacaagtgcaacataccaagaactcgtttaactgtaccagcccaacgcttgacgccttcaccaccgatgttgccaccgagtgaaccttcatcgcctaacttgtccttaatccactttaaagcggctggaccaagttcgcgttttgctagtgcagttaagttagtagctggctttgcagtcttcttagcagttgatgcattgtgtaaccctttgacacggtagaaaccatagcccatacccatgtcatcagcaattcgtgtgacacgcgcttttggcggtgtttcattgaacattgtcccggttcttggattcttgacgatacccacgtgaccggctgcgcctgtcccatgaccgaaaataaccaagtcacccggaatagttcgattaatgcttttaccaagatattggagggcggaactatgttgcatatcaacagttgaacgcccagcattaattccgaaatgctttaaagcttgtgcgaccataccagaacagtcactagccgccttactcatagcacccatgacatatgggacgccagagaatgtagactcagcaaatctcaggaatgcttcacgagtgccacctttaccatcaccaccgccgattgcgttgttgatgaccgtccacatcgcgttagaccaagaattaccgaagtgctgagatgaattttgcgctaatccgatagaaccacgctttaaattcgatccgcttggtttgagcttgtctaagaacatttctttgaagctttgtgctgggttggctcccgccttctcagcaagctttctcaatgcgctatggcttagccctgatcccttggcaaaatgctttacaccggctgatttagccacctgttgggtctgcgccccgttgaggacaccccagccctttggtagcatcatggtgacattgttgccacgtggtaagaacaattcattcttgtcactaactaaggcttcttgtcttggtcctgtttgtgcatcgttgaccatagcaagggtattttcggttagacgcccgtttgcgtcagtaccagtagcaaacttaactggcttgataactgaggtattaccgccgaactgtccaaggaccttgtcaattccagtaatacccttgttaatctcaccaattgagtcgctcattgcatccctggcaaagcctttagttttgcctaatgctttaccaaagccttttgcagtggattcactaagactgataacaccgtcatgggtcttgtccatctgcttgacaatgcctttgtgcatgtctgagtagtcagagatagcccgttttcgggtcttagagctgtctttacccgtttgacgtgtaatcttattccaagtgcttgagctcttcttagaaaggctattaagtgacttggatgacttgtccgcaatttgtttgtagtcgttagttaccttctttgaggttttaccaagcttatcagttccgcttgcgtagcctttgagggttagcccattacctaaaccgccgtttaatacctttgcggtatcgcgtgcattcaggatatgctcgccagcataaacctttgtaaattgcggaccattagcaccaagcaagcgaacgttgttagcataaggtttgtatgctaattcgggaccagcttcaccgacaagggcaccgtgtgaggcgtgcataagcccaccgttggcgtgtgccttgcctgttagtttacctttaacccagttgactcccttgccaactgcaccaagtgccgccttgacaggctttggtgtgtgatcactgacccatttacttagaccttcaaaaggctttttaaataggtcaacggcatttttaccaagattgccaaaccaagttttaatgcctttccaaccagattgaacgtccttgttaattccaccagcccagctttgcatgccattccatttagacttgaagaacttacttgatctgtgacttagatttcctgaccatgaggtgaaaccatgccaaccgctttgtacgttcttattgactccgccagcccatgacttcatgccattccatttagacttgaaccatttgcttgatttatgacttaaatttcctgaccatgaagtaaagcctttccagcctttttgaacgtctttgttagttttaccaccccagcgctccatgccgttccacttggacttaaaccacttattagactttgcactaagctgtttagtccaagatgggaagtctttcatgcctttttgagcatctttaacaactccatcagcccattttttagcattaacttttggaagaattccagatgctttaagctgcaattgactattttggggctttttaccatgaacttgtggtttaaatccagctagccatttattgaatccatttttctgaggatcaaagcctccccagtcccaattttgttttccagcccatttaccaatatcgcggaataaacttctagttctatccattccatcacttggcttaccgtgtggattaagatgcggattgtttccaatccacttataaaagccactccaatccagccaagttcccttggtttcttttttgacttctggaccgcttctacgccaaaagtctctatcagcaatatgtccagcagcgttccaaatcgtagaagcagaaccactcaaaagatcccaggcattatttgaatgcgctaaggtctttaaatttaatctatgattcattccccatgagcgttcagcaagggagcgttgatcatggtacttattggtctttaaatcatagtatccattgtcatcataagcatacagaagctttttacctttcagcttatggtcggacagggtgtaataaccggattcattatatttttcggcttgactatcatacttgccgtttgatttgctgccttttttgccgtaaaccaaatacttcgcagcatgtccattaaaggcttttacaaaacttttagcggcatcaggtcccatagcttgaccaagttgtgcaccaatcgtagcacctaccgtgccaccgagaactccaccaattccagcaccgacaagtccaccgataccagcaccagcactttgaattctttgcgttgcggttttagcagttgcagcttgataaaagtcgttaccgatttgagccgcattaaatacagcagatacgccaacagctaattttgcgcccttggtcatgtttttaaagctggtatttgttccagttaactgccccgtggttttaccaatatatgcaaccttaggacttatatcagcaagcttcttgtactgttcgtacaatccacccacaaatgagacagcttttgcaactttgacggttgcgtatcctgctaagaatccaccaccgacaaacttcatcatcgtttcatgccgtgtagcaaaacgaatcaggcttacaagaccgtttgcaaagtcacctacgactttaccaacgcccttctggaatttttcaccatcttttgatagtaagaacttagcaagcgagttacttgcttcgttaattgccggcaaaacagcgttacccagcgtcatcttaaaggcattcatagcctgttgagcgctggcggcgctaccttgtgcggtacccatgttctttttggctaattcagctacatacgtaccagtcttaccggctttttctgtccgcttagttaagccttctacttctttcgaatatttagctaaaatcatggcaccgttcatgccagtagttccgaatatcgacttaaagaagccgttttggtcggagccacctttactatgctcttcaatgtgcttgtaaagcacagccatatcttgcgacagccctttcaggttgccgtgtgcgtccaccatttcagattttttaatgccaagcttggtaaagatagaattcttagaaccgatcttgttaacttggttagttaatccattgattgtggcacgtagggcagtaccagccttgtcagattccaaaccgttgttagatagaacacctagcgctgacgctgtttccgccaaactaatgttgttagagtgtgccgcagtaccaacgtacgacatagcaacacctaagtcactaaaacctgttgaagttgcatcagccgagtaagccaactcgttaacaacgtttttggtgtttttcagcatcttgctggttgagtctgcacgcataccgaatgcgtcaagaacctgtgaagataccgtagtaacatcgctgaatttgtcaccagatgccacactggcttgcaattcggtttggagggctccgattgcttgtttggtggtataaccacgcttaacaaggtcttcataccctgccgcgatttcttgctgtgacttgccgtatttaatggacatgtcacgcccttgacgttgcatttcagtaaccgacttagttacttctttttgcttttcaccaccaagaacagcaaggttgttaatttcgcggtacctttgctgaattgccgctgattgcttagcgccagaaaaggcagccgcaccaacggcaccaattccagccgccgcaactgttgcaccacctcggatgctgtcccacgcgctgtggagcttactcttcatcgtactggtggctttggtgacctcattagcaccctttacccagcggttaaacccggttggatggattcgttccatctcagattgagcggacttaattccagctttaaacttgttgatttcagcaactgtttggttaagttttatttgctgacttctataagcatcactagccttgtcagtagaactagtggtgcggttcaaggcactttgcaaacggctctgctcggcgcttaatttgccgatcgcgccctgatatgccttgaccttttgttgattagcctcgtatgttttaccctcagattccagacgtctaacatatgacgcggttaccgtgtcaatatggtttatttctcttggaaaattagcggacatgtgcaagctatttgcacgtctctgcaattccccgaacgctgagtttaaagcctgtgtagcctttttagcctcattcacttgcgtaaaattagcttttaaggacagcgacatgccttcatgtgcatcagtcatgtattaacgccctttctttttggcaaaataaaaaagccatcagtttattttctgattgacttcacctcactatttctttccatcaccccagacacctaatccggtggcgcttgcttgcatgttaaaacgttgtttttcttctctccgcacgatttcccagtacatgtttaactggttcctgtttgctttcatggttaaatcaagcggaataccgtgcatagccaacctaattgggtcttcccaacggtcagccgcttcttttagatgttccttattccaagttgccgtcgattccgtcgttaagaaaggaaagcacttcacgggcaacatctaccccacccttgtgagtgtcccagaaatcaaggctcttaatacgtggttgaacaaatacatcattatcaacggcgttgcttaatacgagtgataacttaatatcgccgtcacgggttgaatcatcttcaatcattgaagcaatggcaaaacctgggtattgaagcgtcaaagtgtattcttgtggagttccagcgttaagagtgatgtccttagtgataccgcgttggttaggaactgcactggtttgaagttgcttgtttctagcagctaaaatatcagccatgctagttggcttatcttctgcctttggtgcttctgttgcttgtgcgtcaacatttacagtagtttctaagttttggttttcagtgttagtagtgttgtccataaatttttacctcgctttaattaaagaactgaattttctacaacgtttaagaccttaacagtgatagttctttcaccggcttcattagcggcaccaccgtcaggcttcttttggatataagcatgcgcgcccacatagtgacgtgagccatcgcaagcatcaaccgcataaccaccaacacggcgttcatcggctaagtcgtcaatgatcttgttgaatggtgacatttgattgatggttaaagtaaaggtaccgccagttttgttgttaatacttgcggtacctgttccttgagggtcttgttgaactgataacaaatcgttatcgtatgaaaaagtgaaaagggttgttgcaccatagccataagcagtcttaccgtcaatagtgaagtaaacattattggcgtcgtaggtgcccatcaaccccgtttgtgcgttgttatgagctgccatctaataagtcctttctagtttaaaatcgtgtctgattgaacttcaccgtgtacggtaatggtgtgaattgcacctgatacgtggtaagtgaaactcaaaccaccgtaatgccggtcagacaagtcttgttgtgattgttcgctacgtggtgaagtagttacggtgtaatcacccttaccagtggtttcatcggttaagatgattccttgggcgtatgcttgctccataacttgcgtagcaacaccattgattcgagtaattccaacttggtcatatgagaccttgccattttcttgcaagaattgctctaacttgttttccatgttggtgttgacccagataatgccgtgaataacgtcaatgtattcaccagacatagtccagccttctgacgtttcaccaacgccgctaacttccacgtatgcgaatgcgtgagctctgtgaattgcggacaattcatttgaggtcaatacctcgggtgttacaccctttaattgcttgaacttccaggtcacagaaccaacggtcaaggtagcaattgcacccacaagagcactgtccatgttttcagcggtgtcatgcttcaaaccgacggtgtagttttgaccgtaaatcttgtcgaattgagttacatcgttgctttgaactactaagatatggttcttgttagcttcaaagatgtttgataaagcaactaagttgtcgtcaacgtcattagatgtgcgaactgcaaaggtccagttaaagtaccagaaagccttcaaagcgtcgtatgcctttgatgggtcatagtccaaaactgccacacggtcggagtggttagattgtgcaaagtaggtttgtgccttcttataaactgcggtgtcttcaccgtaatcaaccgcaaccgcgtcaatgttcttgtattcgcggtaaattgcgccagttgccttgtcagtcttgcgtaatagaattccgttcatgcggtcttgtacgcttaattgatctggcaaggtagttgctggcgtagtttgtgcgttagcatcggtgctcttaccgtctttgccatctgattgcgctggcgttggagcctttgcagtgacagcatttaggattaaaagattacccagcccaactactggacgtgggtgtaaaactgaaataaccacgtttacgtcgctgacacggtcataaggtgcaacgacagtggttgtcttagcatctgccattaaatttcctccttatttttggacacattaaaagcgccgtcggtatcactgccgacaacgcttgatgtgcctttaattgattcaattgtgtaatcctcgacattaaagttgaggtctttttctaaaaactcaaagccaccagtaacggtgaaagagcaatcaaaaccaaaatcgtgatcataattaatgccctgtgaagtggttctatcgcccgtgttatcaatgctctgaggcactatgtacgcttgcttgaaaaacctgcgatatggcacttcgtggagtgcttcaaaaagctttctagcaagattcatagcttgtacgctcgaatttgagtgacaatcaatctgcatagtgcagatatactgtctatgcttgcctagccagtcggcgttaggctcttggtccaagtcaatccatttgaaagtgaaaaacggataatcctccatttcgtcaatgtttgcatcttcgaccaactcgcatcccgtgacctgattgaccagctttcccagaatatattgcactaagaaatgatcactcaataccggtaaattgctatccattagggtgcttgccatctccctttagtgcataaatgacaacatcggaatagccttgaaagttggaactgcccgtaattcggtacttttgacctggctgagacggcacttctacggtcgagttcgtgggataaagcttagagctgatccataaaagatctgcctgcgccatctcaccacccgtataaaattgagccatgaaagaattttgcgcattgtttggaacaaccggttcatgtcgctgttccggttgcacatctggcgcgtcatcgtcttcaactcttacaccgcccacgtagtgaaagtgagctttttttgctgggctgtcatatgggtaaaccgttaaatctactccaaaactgtccagcatatccgcaaacggaatgtagaaactcatagcgtgccccctgtcattggcagtattttccaagtaatgcgtttttgaagctgtccagtgtcaaccaaggggttattagccccacgcttgttatcgatggtcagcggtgcgttacctggctttgtccaacgtctcattacttctctcatatcacttacgcccatgcgtcccagcttttcaagcaagtctttaccagttttgccatcatacataatctcttcaatacctgccttgatgtatcggcggtatttttgacggtaatctatgccggtttttctgataaaggcacgggctggaatgtctactttttgcatcagatagaaatatgtgaccaatttgccgtcttgattgacagccgcaatgtgctttcccttagggatgaacagctgatacttatttctaacgtcttttgcagtaacgtttttcccgaactctttaatagcttgccttgacggaatccataagaagccactcgaatttttaggacggatatgcgccccatattcgttggctctcacgattgttaaaagcaagctattttcatcactaaaaaagccaattactacttggtgatgatttaagtagtccatttctttcgtgatatgatctagcctattttcgatttcttcaaaactatcagccatcagtgttgcacaaccccatatcttgaaatactaccgttgccgtaaaggttatacagccatagatatagctgcccccatggcgagcgctggaatagctctaacttgctaacgtcagcataagtacgtttcaacactgaaacttgttcgctggtgacattagccccaccatcgcccatagccttgttaatcgtgattaaatgcaaggctaagtattgcgtagccatgtcacgagctttgatagtctcaccatcgttgttcttggcaagctttggaaaaccatcagccattgctatttgataagcattagtcaatagcccatttagtgcatcatcagacagtttagaagttaaatctgggcttaattgcttcacagcattaagcatgtcttgtaaatcgtccataggctacctccgaactaggctttctttggatcgttgataccgtgcaattgtacaaatgcgtgtgggtagtacattacaagaccaccaagacgttcagtgtaaggaattgtggtacgtcctgagtggtattcttgttgcaattgttgtatttgttgagccactggaatttgtacaatgtccgcgtcattcaagaagatataacccatatcttgcttgttgccgttagacccaaagttttggtgttcaagttcaggaaccgccttaatgtccttgaaccatggtctaatcatttgcaatacagtcatttgtggattgtattggttgtaaggcatatcaagctggtcaattgcgctttgtggcaacgctaaaattggttgagcgtttgaatagccagctaagtgtgtaatcttgctttgggcgtctttaagccaatttctaatctttaagttgttgtctgggtcgtcagcaagtgcatcaaatgtaaccggtgcggttgattcttgcacgcccaacttagaaactgggtcagtcaagccattaatgttaagtgctgggtttgaattatgaagcccattaaaaataagcttgttttcggcttctgctagcgctctacgggctcttgttgccattggcgttaagatgtccatgcctacttgttgagcttcaccaagttgttgacgtgagtatctaaccgcaatcgcaatatcggtcaagttggatgctgattcggttacattcatgtcaactactggaatatcgtcggcaccgtcaacgtaatgtgcggcttgaccggcggtagtcattaccttgtatgtggtttgcttagtccatgctggaacgctaaaagtatggaaaagagacatagctgttaattcttgttcctttggggtcttaataacgttgtcaacataggtaagctgttcacgcgttaaatagtccttattcgccattatttacctccgttcttgttgtctgtgccagttgttgaacccgttgatagggatgctggcttttggttaactgctggtgtgctaggttggtcaacttgtggcgcgttagcattttgcaaacctgagcctgtaacagaagtgttagaaagctggatacgggtttgcatgcgtgcggtaccgcctttattgccggaacctaaaaagacgccaacgactgtgtcgttagcgcctgctggcttgaaattgccgtccttatcaacggctgcattctcgttttcatttacatcttcattaattggtacttgaatagttccctcacgaactacgccaaataattcaccggtttgccacttgtcagcatcaatgttttcttgtgttaagtagtcagcgtttaagtaagttctgcgtaaagccacgccgaaaatatttccgccggttgctggaactaccaaaccatctttaattgcgacaccttgaccgaagccgattggtgctcctgcttgttcggtgttgattgttgcgcgttcaatggttgctaattgacctggtgcaagttcaccggtgttgtaaagttctccatctggaattgccatttaattacctccttaggctaagtggtagcggtcttttgcgggtttattgtctacgctgtctgtcttgacattggtttcaatacccgtgtaaccaactacgccagagttattgcggttcttgattgagtcaaaataagcgtcaatatagtcatctgacttagcgcttaaatcgactgaatcagtcttgctgatagcttctagcttcatttctttcggagatttgcctttaaaatcaaaagaatcgccaacatatggctttacttcatcgataagtgccatacggtcagcgattgcttgatctagtgcatccccttcaaactttttcttttctgcggctaattccttttcaagagaatcagccttggcttgtgcttcatcaagtgatttcttgttagcatcagcaccaccctttaacttgtcgcgttcggctgtcaaagccttaatttgagcgtcaagtttggcaatttttgagttattagccttgttgtcagcatcaagctttaaaattctttctgcgtctgtggttgcgactgtgacatctgcaccatctaaacgaatttttgtagtttccattgatgttcctttctcttgtgaatcatctataaccatttctgcactgtcaccggttaatctcaccgaatgaccagcacgaccacgtttaactactgcgacgtgattaatttgaatgttcttttgtgccgaatcgtacgccatacccttgaaagtacctttaacgggtaccacatcagtttgaaatccaattgaaagctcttgcttgccgccctgaatttctttgattaatgccgaatcggtgatagtcatgtcaactttcagcttgtcaccatcaacatgggcattattggcggttaatcccttcatatatcggttcgtattggtcacgttcaccgattcttgtgggtgatcgtctgtaactggctttgaatttgcactctcaacagccgaatcagtcaataaatcatcaggaagtttggcttccatggtgatctgcccacttttaccgatataaggaaaaacgcccacacgtgcgattggcacattgcttacatgcaagaatcctgtttgtgaatcaacagaaaacttgttaatcgtcgctgtatcgtaccgtgtcaggttcatgctattcgcctactggcactaataccggttctttggggatgtacagtgtttgcctaggcttaactcgcatggtgtcctttggtacatggttgaaataacgcaactgttgcaaagcgaccttgtacttttgagcaacatcaaacaatgtttcgccatcttgcacggtgtactgttcgcagcctgtataatcgaacatccctctagggtcttttacttctgccattggcttcacctcctttgctactggtgttggtttgacaacttcaattggcttttctacctttggagctacctccacgcttttaggcttcaaagcattaattgcttgcttagtttcttcattggttaaattggttgaaactggtttaatttcgtttgaatcttccataaaatcctcctaaaatttcacaaagtaagaatgttgatttaacgggcttaaatgagattcgcccacgggcggaatacttaaaaatttcacaaagtttgctaattttgggcatgaaaaaagcgctccctcgcattgaggaagcgtttgtgtttcatttaatttttagtcaatcgggtcagcgtaacacctgcaccttatcggctcgccaggtagctgcccattatccccgccgttggggtcatcatacttaaattccttgccgtctaactctctgtgttttagtcttacccgtttgtcctccattgaacgccaaatatagcgcgttgagcctgcctgtttgttccggtaagcgtcaatctgggctagtattttgcctgtctgatcagttgcaattaggtcagcatgacgcaaagccataccagttcgattgctgatagcgtggcttatatcagtaagaccgccaccatcattgacaatgcggtaaatgtcgcctttcagctggtcaatatagcgcccttgcatggttttgatcaagttcgtattttctaagatcttaccccaggtatattcgcgcaattttgcgttatctcttaacggatttaacgcataaggtcccatcttcatctgcacattagcttgatgcacacgcgtcttattagcactgaactggttaaccgcataaacaaaccgcatagtcatgtcatgcaagatttgatctgtgaccgtgttttccatatcaacagacatcaaattcaaggtttgctgtacgtaattagtccactctggattacgcgaattatccgcatctgtgagcattttagtaccgttaataagataatgccttaattgcgcgtcagccactctgaaagctattttttgccattctcgaatgagtttggctaatcctcggtaatacgaccgttcaatcttcaatgggtagccatttctacgccttgccatctataccagccttttcaacatctttgtagtactggtcaatttgctcttgcgtatatcgagcttcgatattgtcggcgctgtcagtcacgtttgcgttgttctgcatcccttgaattgcgttgttgccttgcccgttgaacatgttgcggacttcatcaggggcaaaaataccgtttgtgaccagtgttccggccgcatttgcatggttgaccagtgtctcgctttgcgtcttgtcgtccggtgtccatagcggattaaactcaatgtgccattctaagctgtctgggtctaagtaaccgccaaattctttcgaatacatcaacaagcggacaatattcatgatttcgggcttcaaaatctgctcttgtaaggctttcacactgtcataatagttttgcacgtcttgccctgcgcctgccagcgtgccagactgttcacccgtcaaaaccgatttagggatgtttgacgctgttgaaaggtcttgccacaagtaatcaagtaagacattcatgccaccagttggcgttgctagcttggtcacggtgtcatcgttaccagtaaacatcatagcttcggtgtttgctacgcgtgctaattcgtctctgtcgcgtctgaactggtctaatggttcattaatcagcctatcagattggaagaccttaaacgtaaattctcgtagcattttacccactgattcggtagcaatcgccatattattgagttgcttttcacagcgcttgataattgatgtccctgtttggtcatcgtcaaacttgtctaagctgatgtgactatacctggtagcatcaagaacaatcgcattttcgtccttggtttcttgtgttggattaccgtacctgtctaatgtggtggcggcttgttttggttgaatcttcaattttgactctttgccgtagtcgtcactcgttggatcatcgtcggttagatagctttgtacattcttttgaccgaatgcgtgcaatgctaccacattctcgatgttttcagggtcaagagggtcaaatgtactcgttggatttgtctctttaactaggtaggttatatagccatctccgtgtttgcgttgatagatgatttgctgagacaaaacctgttgcgttttcaaatcatttaagcgattctgatacatctcttgtaagtctggtttgcctggaatgactaaacggaatccgtttcttgtggcgtcttctgcgacctttgagaccattttatgagcgatagcatcatacttgtatcggtcgtctaaggcttcatagtcctgtgagtgattaactgtcttccatgcaattgactcatagtcaaccgtaggacttaggtcaagcgaatcagaccgcacaactggcgttttgaagtgccttattttctttttggccattgacatcctcctttcctagtatctaacaattggaccaccaaacttcgtgttaagtcgtcttaatgcgtataccatcgagtccacgttatcatcgtgtggcatgttcgggaatcctaaaatttcagcaatccagtctttaacttctgggtgccatgcaggatgcggtatataaacctgtccagcttcccacattggagacactgacgccgcacgtgcttccttgctgtctgcgcctggtgacaccggcataattcctggaatctcacgtctaagcgtgtcaatgattgccggaccgtttgccttgtcctccactagctttacagtagcgtcaggatacatgcgggacatggctctaatagcgtctagcgtctcagtaaagcttaaacgcttgtggcaccagttagggcgcaggtagtaattggcaccacggcgtgaccaaacttgaccggctacaaagtcgtcattagccttactcttaaaagttgcatcccatgcttgtacggtttggtctaagtgacgtggtagaatcaccgcatctttatcggttaatcctagccttgcctgcgtttctctgctgtccacgtagtacttgacccactcatctttgaagatgttaccgccctcaataattgggctctgctgatacagtgcggtaaacttgaccgtccccatatcatgcttgtgggtaagcaattcatcgagcgtgtgcagctgcggacacagggcttcaccgttcttgcgtccaattgcatcagttgttccggctggaatgtcttctgcgatagccggcagtttgacttcttcccacggtagggatgattcagacaataagcgcccggctagatcgtctgtttgccacctggtcatgatcacgataaccgagccacctttttgcagacgtgggtaaaacgtcaaattccattcgtcccatatcttgtccttgacggtcatggaatgcgcttcttctgcgttttttacggggtcgtcaataaccagcaaatcggcactcataccagtagcaccaccaagcacagaagtagcatagaaaccacctctgtggtcttgtacagtaaatgtctgagctgtgttcttgcctgtctttaatccgaatagcgcccctgaccaatcagaaaaagcacgcctgttgcttgccgcaaactgactatataagtcttgtgagtaagcgactatcatggcgtgcttgtctggatatttcattaaataataacttggaaaagttttcgttatagttaagctctttccatgctgtggcggcatagaaattatgtaaaaatgctgttcaccgtctgctatcttttgcagtttctcggtgatcagctttgtatgtggatacatccgcatgctgggattagccagcagaaagtaatcactgtaacttctacgcgcaagtgattcctttgccgctaatgcaattccgttcttttcggcggctgtcagcttaatcatctttttcacctgctaacttggctaagttgcgtaactcctcagtgcttagcttgtccatcttctcacgggtcttgtcagcaaccgtatggagttgttcggcttgtgcctttgctacctgtgcctcagcctgcgccttaatggcttctgcctgtgccttcttaatctgggctttatccatatcagataatggatagcgcttcaagatggcttcactagcacgttgcttctctgtgatagttgggtgtacggtcaaccaaaaaccgtcttttgtctcaaccgtcgtagtctcttcaccacgtgcaattgcggtaatcagtttcaaagcttcatcagccttcataatcttgtcgtcttcgagcttttgcatttgagcgtcaatacgggctttgattgtagtattttgtagtaatttattagcattggtgtgagcatatttttcgctgtatcctgccttaatagcggcatctgtggcgttgccagtcttgacatattcatcggcgaacttcttttgtttaattgttaacttctgctctgccaaaactagcttcacctcctaaaaaaattaaactaatctgcattttatattgacatacgtattaaacacgtgtattataatatgtgaaaggagaaataagatggtaaaaagaagagatgcccttaaagttttaaaggaaaatggctggtggttcgaccgtcatggtcataatcatgatatttataccaacggtcatcattcagaatcaattcctcgccacggtgatcttaacaaagtcacttgggaaaagattatgaagcgaaataatcttaaagggtaaaataaggggcaataccccttattcgtgtaccatcttaaattgttaattatgaaaaaagataaaattgttgtatttccaatcgttataactccaactgatgaccctaaaatcaaatatacggtcaatgttccagaccttgaccgtgatacccaaggaagaactattgcagaagcaattgatatggggaaagatttaatcggaaccatgtcactggtagaagatttacctgaatcaaatgctaaaattcctaaaaccaaaaacaatgaaattgctactttggttactgttaatatttcggaatataagcgaaaaaatgataaccgtgtagtcaaaaagaccttaaccatccctaactatttaaatgaagaaggtaaagaggcaggtcttaatttttcagccatcctagcagatggtattaaagctaaattaggaattgagtaatgtttccatctaactttttataattgaaaagattttttgcataaaaaataagcgtcatctctcagcaacgcatatttatattcaattcaatacttttatattattagcggcgctcgaccgcacaagggcgagcgcccttggctctggcgttacgacttgatcgcaacaattatcagaagtataatgatcaaagtaagaataatttctgacaaggctattcacctcctcatttaattacgggaggtgaatagcctttatttgttatatgatcttagtttcgccagagccaaaaagctttaattcagggatgcacctgtttttctgctaaacgagtcgtttcttccaccagtaattgatctcttaacttatttttaacttacttgggaagcaagtaattaatatcctcttcactcatgtaatgatttacaaaagcagcctttttaaagcgaggatttgtctccatattgtcttttgtcatattccagtcaggcacaaccgtagaaatttgtccatttcttcctttaactaatattctgtttttgctaacacgctttacttcaatttcaccaaattttttatgaatattttcattattatcaaaagctttcgtagctgcctgcctagcctgattacgaaggcggacatatgaagcaccggttttagttgacttaaaagaactcgatctaccacccatgaatatacctactttctttttaagtagtccttatattcttgaacagcagaattaaagcttttctcatatcggtcattcaaatttgaagaaaggtctttaaaacgagaaaattttgctttttccaaattaccggaaccataagacaacgaatagccccattttttaggccctctctaaatcttctaaaatcacactacaaaatttgctaatatgcctattccgtagcatcctcttcaattttttcatatgcctaattttttactccatttgtctaagaattcttgtggttgcatccctgtatcagcgacaaaccaatcaataaattctttatctacgtcattttcaacacaataaatggcgcgttgtattctgcgctctaataatgaccctctaagcggatttttaacgccgcggtatcttctatgtttatgtgccacggcctcacctatggtcttattttcttgtgtcagcgggtgtcttagtccttccatgaatctccatacttttctatgtactcttgtggcatcatgcccgctttttgtttaaacgccacaaatttaatcatgtctactaccttgttgctggtattgtacttaactaaatgttcagcttctttgaccagcttataatgctttctaagctcgtaatacttttctggggtcaattaatcgccctccacgcttaaatcgctgatacgcatgtctaagacgttgaccacggtcatcatcgcattacgctggatcttcaacaatttaacctgatagtctgacacgcctagcggattgataatcttgttatcaatctttaataaatcatcttgtaagtgttgtctttcatcagttaacttgctgactaatgtcttattttgcatactttcttgatcctccttatgcaaaaacgtgctctcgtagtcctcaatacttggtactactgatttcggtataggaatgattaattctggttcatcttgcttgatttcagcttctttgatgtcgtcctctggtgggcgatatttcgattcgtgccaaaaaccgcttctttttggtgtagccttgctgttcttttcttcaacccacttggctagcgatttgtctggcttatctggtttcttgtgatacatgtttaagctcctaaaaatgcaaaaaaacatcgcacattacgtgtgatgtcttcaatgtgtatttagttttataacagactcgctaggattcgaacctagattactggttttggagagcagccgcttgccgcttagcaatgagtctaaaagccacagtcgtactgtggtttcctaactatatggataacagttagaagggttagaaatgaataaattttgaacttcaaaaagagcatatatttgagccttttacagcccaatagggagtgtggggctcgaacccacgatccttgcaacgctctaccatctgagctaactccctacctgatcaaatgaggtgcaagatgcttgcattaagctactcttttacaatttctggctcttagccttctctgctttatgtcggaatgcagacgtcctccaccgactttgctcacgaaatcaacctcaacggtctgtgccggaatcgaaccgacgtttccgcatagacagtgcggtgccctagacctctggactaacaaaccatttgcacgcctgtgcgtgactaacttaaccatttatgtaagaccggttattgcctcacataattgctttattttatacgtcgctagcttcgaaccgacgataggaatagctggactcgaaccaacaaattacgggaccaaagcccgttgccttaccgttttggctatattcctagttatgcgggtggctattaaccacttgaacttgttaaatcgttgattattcagtcacaagtttaagcaagtcgcaatataaggagcggccttatatctcttgcttaatttaaatcttggtgaggatttatcctccaactttcacccaacaatgcgattgatggttatgcaaaaacctgtattgtaatttccacgttttgggctactcgtacggcacgtatcagttatacccgcatttctgcggatcatcgtggaccagaattttaacttacatttatctcgtggttccctgacatgtctgccagattagcgtgagactgctttacacggagcgcctaaatctccgccggcaattgtaattctgctgacattgttgcctactttatcaataatttaatgctttctcactcaaccaacgacacctatttccttttcggtgtaggtcaaccaaagctattaccctttggcttgtctgaaattccgtcggtatcccggcagaacgtcgctgtcgatttatagattgaatggcgtgaaccctgtcataggtttatacacacgcttcctcatataagcagtgagggaatccaacccccacacgtgaccaacttggtcagtgatataccatatctatggttcttggtgcttgcaacattttcaagttaaaaactcaaaagcaccaagttgaaattgttaatgacttaaatttaacgtgcctcaacactactgctttgacctctgggacacagtcccaaactagacgagtaaaattcaatttattacttatgcaattaataaatatgattattatacttagtgccggttttccacgccggctaagagctagtgaggagttgaacctcaccacaccaggcaattatataaaacgtatgtggcattacaccgaatgctagctcataatgcctcgaatgaggcaaagtgattataaaatttgggatatggaattagaattgccattccgcccgaataaacgggctacaacagcatcaggaatcgaacctggtctagggcgccagccgccgttactggttaattggagttttttaataaatatatggtttattaagactcgtaacagaaaaacaaattgtcattgtacctacacttcatcgaaaaccctgcttcctaaattttcgacaatactataatatagccatttcactccgcttgtactccgataaaagtccgtttaaactccgtttttattttttcggtaaatgtgaagatctttaaagtaggggatgctataccagtctttccatttttcgaatctgtcagcaaattcacacaaagcttggcgctttttgatgtagtactgactatcttcatagcctagttcctgctgaatcttgtagtcctccatgttgtgcaagtaagcctcagacaagattttttgatatggagttctgccgccatttctacaattttttatagttttgtaaattgctttacatgcttgttctgcttccatgatgcggttaaaacttgactcagtatgatttatcccaccatgcgatgaaacgcctgacgcgtccattttggggctagataggtgtgaatcatcaacaacagacagatcagaaacatttaaacctgcataattttgaaaatgctcaaatttaaacgtaagaaaattcctcacgttatttgcggttgcctttgaatcaacctctaaattatcatctagcgtcatttgctctgctctatctgccattcgtatatcactccgtcattaatcttcccatgtaactgttacctcaacatggggatgcattgaataccatttctccacgctatgcgtaacaattaatttatcgtcttcataaaatccatcttgcagcaccatttttttgtgtagcgctttgtttaatttcatctttgggttcatcccatcaaagattatttttgcgatgttgtcgctatctggcttctttgtggggcgttctttgccttttaagcataattccctacgctttttagaaaagctcttagggataccgaaataggcttttatggacacgccacactgtgagttgattggctcacttatcttgtgttcttttctggcgtaaactgcaaaatatctcacaatatcctcatatcggtgcgtttttgctggtgtataagttctaacaccgccagctctacgaactgtccgcgggcgttccttgctttgtggctcaccaggtattacaaacttgatgcaattaaccgtcattctttcaccagctttgcaatcctctttaaagcattgttaaaatgcttatcatttctgcttcgatagctggacgttttcaagccgcttataagcgttgccagcgccttgatgtcctggtcttgtcttgtctgatcttcaataacaaggtcatgcaactcagtcatttgccttgctatggcattgatagatttagcgttagctacttcacctttctggacttgaattaatgctttttgaagctgatccaagtcttccgacaggagctgttgccttttaaacagaatgtcaaggcttgcattggttgcacgtgagaatcttatattctgacgtatggagataaaaattaaaatcactaatgcaaatgacataatcacattaattattgtcattacttcgtttactactgccatgtaatccctcactttctgctaaaaatcatgtaaacttcgttaggtttaacttttgtcaaatgctttaggtcaaagtctgcattgtgagccaaaatatcttctaatgcgttatcaattgtgggcactactggtgttgtccatccggtctcaacgcactcaatagtcacgtagcttgatccgttaacactcaaaacacgataatgggtgttagttatccagcaatagaggaagtcgcctacttctagttcgtccggactgcaatacagctttttcaagtcattaaatagtttcatttttgtatagctcctttaaatgatccaatttccgtgaaaagtccaaaattgcctccacagtcttagccattttctccacttttaaataaacgctataaatagccatgttatcctcgccatataattcatataagcgaactgcacaaagataaatgcaaatcctatccccttcaattttcacattaaagtcgccatcaattttctttagtttcttttcatcaaacatatagacggataaatgaccggcgcttgcgccacaaagaggacaatgcaagttgtcttctgccgttaaaacatcgtaagtgtctatcgatatatttactccgcaactatcacaatggaacatcatttcatcttgtccatgtccggttaatcttttacagttcataaatcttcaccttcatctctgtcagcaaatcaaacaattcttgtcgatttgtgaaattaatacccgggggcatcaagccgataaccttagcatacggcacatagctagtaagtcattcatcgttattctcccttaacgaccttttttaaatcttcaatgtttttggctctggcttcgttaaatttactcattttgtctatcctctcaattacttatctttatcttgtgtagcgtctttccttaaatctctaccgcaattcgggcaaaaattcggtttcttttctgtcttatacatccctcgattgatgtcaaaggatccatcattatttagcgacaagaagccaccaaacctgccattcttttctctaaatgcatatgcggctcgattcatgtttttaaagtcacagtactcacatggtggctgtactaccttaatcttcgtcatcgttatgctcctttgctgttgccactagatccaccttttttatatgatcgcagttgttcgctatatctcgggctaaatcgtcaagatttgaataaaaatatttatctagcacgtcgttttcattagttgccctacattgctcatgagtggcattaagtgcaatgagtgtataaggcttttctaagtcttcatagtcatttaatttcgtgaccattaaatagttcttatcaacggacgcatcatcattccaacagcaaattgtgtcattaacatttaattccaataagtcgtttttttctgacttttcaacaattttaatcatgtgttatagctccaatcttttatctgaaattcctgtaaaatctaaacgtctaccgcgtgaatccgataacaagcgactaacgattttagggttatacgcctgttgcaactctttaagcgttaaattagttgtgacgattagcctcttttgcttatcaagaatctgttttaatacgtcctgtttaaattcagttgcttctgttgcctcattctgtcgcatagatgattcactgcccagatcatcaatcactagaacatttacactacccaaaaagttaatagcattctttttagtccaccagctcgttggatcttccatagattcataaatcatgtcaaacatcttactaacgtctataaataggcaagtttgtggtggattgctcttagcatttacgatattaaggattgacattgctaaatggctctttccctcgcctggcgtgccatacatcaacgttgtcatggctttatcagggttatcaattagttcatgggcaattttataagcagcattacccattgaagcctcttgtgatccttttttagccgtgtaattttccaaagacttttctaagtcctctggtctatctaccaagcttctagtacgtaaaatcttagtgaccttgtcatgcataaagcgtttaacttggttattcttttctttttcagtttgttctttcatacattcaatacaaaatggcttgcctttgcggtctagcaccatttgagttttatgaattggacatacttggtctgctttttcggttttaattgcaattccttctagtccttgcatcattatcaccacctttaaaacggtaaatcatcgtctggaatgtcacttatatttggctcgccaccgtagccgccattagacggctgtttcgcttgatttaagtcattagcattcacataagaatcaaacttagatgcttgaaatagtgtagatggtcgcatatatttccagaacctcgttccttgccatgcatatgcctgattatcaatggcttttttgaagtcttctagcgttgcaccttcctcaaaccgttgtctaattaatttctgataagctttggtttgatagcgtagatgctgattagttttcttattgagataatcaataatttctttgtaaggaatatgccgttctgcgtcagcagaactatatatatcttctactgttctattaaatgttctattattactgttatatttagttgaccgtggtgtcatgggggctacgacatctgtgccagtacccccttgacactcattttgccaccctcttgacatatatgtcatgaggtcgtcgccagcacgtatttttcgacctatgattgcaccgttttcactgcttttaatattctctctactaattaattttttctcttcaagaagttcaagatacctattaacagagcgtgaattaacatcaattctttcagctattttcttgttgctcataaagaacgagcctgtgacattcagcattgaaataatatgtcccatcaagataattgacttaggcttttttaaaaggtctttatcttccgcgattgatggtggaatcattaagaatgcttttgcaccagtaaatgctttttgctcttcgctcatatttacgctcctatcttcatgccgtgtgtaacaagatcatttttcttaataaagtcgtacagagctttattcttttcatctttctgtttccaattttcaataaacgctttggcttgcttgtctccatcactttcaagacctacaatatcggttacgagttctttgccacctccatattgagtctttcgcttttttgctatttgaattaattcctgcttggtagttttctccttacgctgtggcgttttttcgtcgttgcttggcaaatcttcaccagcgtaaatgttcaaacctagccctgcgaatgctaatgctttggttaatgcccgcatttgtgttttattaatttcaaagtaagtaacttttttagggtcaagtgctctattgtgaaagtccatgacataaagctttgaactatatgtctcacctttaatagttacactggcttcaacttcaacaccgtactcagtacgtaagtaatcgtgtgtaccaatctgctgataattaccgtctgctgtttgtgtgtaatatgggtattcccgcagcttataactagcatcggggaaaatactctttaccagaccccaggctttcgcccagcttagataattaagaccattctttttatcaacaaacttagaaacatctacttttgacaagcgctcataaacgctagcgttgtcttttttggcttgttctttcttttcatcttgcaactgatcaagaatcttaattagttcatccttggtcatctctgcaaatttctctgcctcagtcatgtttaatctctcctctgtcggattctcgattgagttctgttactacgtcctctataaggccgttaaataagctctgtgcttgttcttctgccgtagccttataattaccctcaaagtcaattttgaactgtttagcgtactgttttgccttaccataggtcttcatagtgcgacagtcgtccagcatctctttgcggatattagggatatcttcgataatcccgtctagccactcttgtgcatcatgcataactgccacctactttcctgcggcacggtcatacatgccgtcgccccattcggcttcggggtcttcttcatcctcgtccacgccattgagttttttcatgcaaagctcttttgcgctttcttcgaaatctttataccccccctagtgtgtctacgaggtcctgtacgtcgctaatatccaatctagggtcaatcttaatcatgtcgtttagaacatcactgaacgtgtgatattcgtctccaaaggtgttaacagttgcaccaatgtctcttaacttatatgtatccatgtgttatacttcctttagtttgatttattttgtctggtactcattgactgctactcaatgagtgcttttttaatacctaaaatctttttaacttctactggcatagtcgcaaaatcagaaccgctaacgccgctaatagcgttactgttagccataaggataagctggctctcgctgtacttaccggctcgttgatacgccacaccgaattgatgaacttgtaccataacttcattagtcctccttaaatcctgttaatagccagtcaacttttacgcccagaaaatgagcaatctcgctaagtcttctcttgctgggaaaagacaaaccattttcataccggctgatagtcgttgtacttgcgccaatcctttcagccagctgcacttgtgtaagttgcctattttttctagcgcgcatcaatcgcttacccaaaagtttagtctgcattgtcatcacttctttcttagctttttaacggcacgcactgccaatgctgttagcaaaatcatcaagaccagcagcagtgagataatctggtcgggatgcgttacaccgtagatgcatagctgttccacaatcgcaaatggtaaaaatagaattgccataaattctaggattttaccgaatgcaatagtcatatgacttagcacatggtcaagttttgtcttgccgtattctctttcgtattcctttttagtcatcttgtaacccctttaatcctttcattagagcgtccatcatcaatggagcggcttcatccttaggcattttttcaatctgctcacgcatttcgtcggttagatgctggattaccccccctaaaacgaacggattaccatactcaaattcacctaaattacttccatttgcgacgcacataataattgcgctgtcttcatcaaccttgctaaacagttttgcaacttgcttagacatcttttcttttgaaaattcagtatctttgttcatttctttttctccttaaagtcttgctttctttaaatagtctttcccgtcttccgcgaacctatccaggtcttcgcgcaagtaatatctcgttctgccgtcacctggcaggctcggattgataaatccccgctttaccgcgttatcaaagtacgagccacttacaccaagatagtgatatgcatctttgcggctgaacattttttgatcggtaatttctccgcgctttgctagctcttctctgacaccttcacgaactcgcttagcaataaatctttctaattcttcttcgttaatgctcagaagagccatatacctcacctgctttctgttacaattgagtcatctccaataaaggaggtgattttaatgaataaactgcattgtcctgaatgccaatcagtaaatgttaagccgattgcaattggcaaaggtccaacaacttttgccttagttgtaatgagaaaagacaatcttattggcagatcactgtacgtaaatttaattcgttgcaccgattgtggattcacttggcttaaactaactgataaaagcactgagtttattaataatcatcaggattaaagttaagttcttgacccaaagctgataagcgctgcttgtcagcttttttgatttcatctctaacaatttctttaattacttcaatttgttgttcagtgaaaatcttgtcttttttcattacgttttagtctcctttgtcaattggactggtaaaaacgaataagttttaatagcagttctttttcatacaggcttgtagccttgcgataccatctcgtaagcattacaagccttgtttttttatttaacctcatttgcttcacctgccttattcgatgtcactgcgctcaattaaaggcagaatgtcgttatcttttaaaatgtcatagattagctttctgcttttttgcgtccaatacgttgatggctttgatctggttctgcctttatgatctataaaggtaaacggcttagttgttacatagccttgacccatgtaaaccttatatagaatccattgaccgttaatcttgtgctgaatcctagctttatgaagcagtttgttaaaatccttggcgttataaccgtaatccgccgcaatttgcgtaactgctagtgtgtctggtgctccaagaatcacatctaagtaactagcctttttattggattcctccaattggacagttaagttcttgttctccaatttcagttgcgtgttttcgttttgcagaattgcatatccacgtttgacaatctcttgtggatcattccacttgcgttcaacttcaattaaatacttgcggtattgcttacctttttcagtgcggctcattaagcaaagttgttttgccatatcaattgttaaggcgtagtcatcaatttgccttgtaccgccatttccaacatgtgcacttttaggtgaatatgtataatcgacatttttctcaaagtctttgctgttttgtttccaccaatctgtaaacttctttttaagtcccagaccttcatgtaaatctcttgcactaacaagttgctgatcattttggactgtaactttaattaattcttgcattgctattccttctttctgctaaaattaagtcatcctctaataaggaggggatatcatggcatcatatgttattgcctacgatctaatgaaacctgggcaaaagtatgaaaatgttcaggaagtaatttctacaatttctggcaacgacaatgttgaaattcaaaaatctgtttggctggtaaaaactactcttagtcctgcaaaaattagagagtgcttttcatcagttttagataagaatgattcattctttgtctgtgaattgagaaagaacttccgcatcaattcagatgcctatactgacatgaaagttgatcgagatattttttaatctcatcaatattcagacgaaatttctacttttgcatttccgggatcctcattaggattctgttttttgaagtcagcgattctttgatcgttggcttttttccatttatagcttcttcttgcactaattacttttgtcaaagctgtatcaactgaatccgaatatggatcatctgtatctctgatcaagtcgtcggttaagtccttaatcaattggttaaattcatcaaaaatcttgtcttctgtcattttgctcactcctccttttgatacaatgaaataaatatcgaatctttaatgttaggagaatgattatgcataaatacgagactttgccagccgagagaaaattattaaagaaatacatcaaaatacaaaaagcagcaccgctgaatcaaattagtattgatgaaacttctcaccaagaagttaatagttatgaattcaaacttttagttgaagctgagctcgttgaatttatgccttctcgctattcatacccgtctgaatttaaagttaccgatgaaggcttaaactttttcaaatggagatgggcaaggttttggaacactctctttaaaagcatccttttgccgatatttgtttcaatcacaacaactctaatcactacaaaattgcttccacttattttccattaagtgctgcaagtgttagcagtgtagtaattaggcttacgaaaaacggaatcaaataatcccagtaagcttttttattaaatctatcgatcttttcgtctaagtcatcttcatgagatggcttatttttgtatttactgaatttcattttttctctctttttttatcccagtcgtctgattaattcaccatcaaccaaacctgacatataggcatattttgaccagtcatcataactagctacgtataaccgttcaataagcaaattaacttgggttctctttaactcatctagtgtcattctttccacgtctttctgagttatttctatgattggctttgatttccattcgtcttgcttcatgtccattgctctctttcctacttgttgagctcaaagtcattaatccgtggtaattcaacacataagtcactcttcggagtggctttttctatttacattcctagtaaatccatttgttctaaaacaggatgaatatcgaaatcagctaacagatcataaatgaacttcttacctcgttgtgtccacttaagattgtttttaataccatgctgcccattgatctttttaaaatcataaggttcatattgcgtataacctttatcggcatacttttgatagataacccactttttctttttgccactacccactggatagatcacatggtgatcatgtaaaaaatcatttaacttctttgctgaccagccaaaatcttttgcaatttccgtggttgtcattaatccaggatttctcatttgagaatcgtagtaatcaacctttggcttttgctttgctaattgatccgcttcatctgctgccagtcgtaaagcctcgcccattgttcttggaatgggaaaactctttaatgcttgctcaaccggattactgatctgttccttcattgagttaaacaggctcacgtattgagctgtaaactgattgcctttcttgcccgttaacttattagctacaaactcacaaccttgcttagttagtaaataacaaggcaaaattttgttttgatcacttgtatatgtactttcaatgaaaaattgacgtgggtccaaatttggactgtcctgcatatcgttgatataagtacgaatatcccgcattaaatgcttatgttctttgccgatcatttcagcaacatctctgctgtttaaaactgatctaccttcaaaatttaaaagcttcattttgctttctctctttcctgcttgataaactcaaacacctcatgtgcctcggttacctgctcatcagtcatgtacttaacttggctaatgttaagagcagctcttatggcaccaaaaatttttgattgcaatgtgtaccagctactaccgtgaagattgtcttgacgtctacagtagctttcaatttctttacttagatccgtccaattaggattgattttgaaacctccgcgctggtctagtgtttcaacgaccatttgtgcaatttcttgcttttcttcttttgtcagcttcatttacctcatccctttcagattaaggactttgcaaatcttattacgaagctcttttgacttgggagtcgtatcgcccttaatagcacgatttacctgttgcggattttccttgatcaaacgtgataattcacgttgagtcatattcctttccagcaatgcaattttgatttttctttccattgccttacttgcttccgcaagcatttcttcaattggcatacaatcacctcatatcttttttggttatttatttatcaagttattgataatttttatacgattggatacaatgtagttaaaaataaatcgcacttagtgctaatttataagtattcaattgttttttacttttaagttatttgtttatcaatcacttgatgatttaataataatactattggatacttttgtaaagagaaaattatctttttttatacttttttctctagtatacgaaagttaggtgttttaaatgtcattagtagaacgcattaagaacatagcttctaaaagaaaaggatggaacttaaaggaaacgtcagagcatgctggattaagtattaattctatctataagtgggataaacaatcccctagtttaaaatcattatctgcagttgctgacgcactcggagttacagttgatgaattaagaggcattgaaaagaaaaagccccaaattaacccggatcccacttttgctgatttagggatgccgtacggtgggaagattccagaagaactcaaggatacttacgttgatttagctaagggctactttaaacgtcatcctgagtatctaaataaggattaaaaagtatgattagatcttttgatgaacttagcatagaaaataaagaaaattatgacaggcttataaagtatctaatgaatgctgcaatgtttgattacaaaataggtgttgaattttccaatcgtcttccaccttttgcacctcctcttagctataaccacgttggcagattgatcattatgaacgcacggtggccatatccaacggaaataccatttcaattagctcacgaaatcgctcatgtcttatatgaagatcaacaatattacaacttgaatgatcaaactgtaaatcatggcgaagctgatgcaaatatttttgctataaatctactatataaatactgcgaagaaaacgactaccatttcgataacttctacaattttgccaaagctttctgtattcctcataacctttattatctatttaatgatggttgcatagtccaaagccagtgactataaacctaaggcaaaaatatctattatggaggaatacaacatggcaggatttcgaaagccatctgcaaaaaagtcttttagtgctagaacaactggcagaattaaccgctctgtaaagcgcgcaactaatccgttctatggcaaaaaaggcactggctttataaaagacccggaaagaagtattaaaaattctatttatcataaaactacaactggtggatttagttccattaaaagtagcaaaacagaacagtcagatgatctatcagctgatgaatgggttaaagtcatcttattttttatcgttgtctttatagttggtggatttattggagttactttcttctaagcaaaataaaatctgcccgaaggcggcggaaaggatgtgaaatatatgaacgacattttagaatttttgaagtctatcagtgatggtgaggtgcaccagctaaaaaataaagatgcttttgctgcacttaatggcaataatgatgaagtaatgatggtgttaaaacttaaaaagcaaggcttagtagacatcaatgagggattcgttggcggtcaccctgctattaccggctattacattactgataaaggtcaagattatataaaaaaacacacttcaaagattaacggcaaaatcaaaaaaatcttttgaagtgtgattacattaatagttatcccattaattatagcatggttaagtcacgagttaggctggaatcagtgaaatggcaatattccaagaatattccacaaccaccagccaaacatgatggtgacttcgtaaaatatgatttttacatataatttaatagtttcaatgtcatctttcatttgcctatctccttttcattcattatatcaaagtccacaacgccagcgactataaacctaaggcaatatctattttggaggatatagatatatgaaacatagatttttagttacagcaatggcatctatcatgttgctcggtggtacaggtgcagtctcagcagttacggcacaacccgtgcaagctatcagtaaacattcgtggcattggcatgaagttaaaacaaccaaagacgtaaaagtatataagttaagatatccgctttataaagcacctaagtttagcttctggcttgccaaaggatcctacgtcgatgttagatatttcggcaataatcattattacgaagtaagaggcgacttaggtcgaggcactcatattgtcaaaggatcatctactagatggtttagaaacgcataaaaataagcctgccaccctttcaggtgtgtaggctttgattttacggtattaaagaacatcagtttaaattatttgatgattggcaaccacttttgtactggtcccaattgttcaaatgcttctttcatagagcgatcatttttcaaataatctaaaccactcatagtaattgctgccttactacgattgtttaaaacgaacatcccatcaagagtttgctttacatacacaccgtcaatatacccttgatcaattaacatttttagtgttttcaagaattgattgtttgaaattgagagcatcccttcactcaaaatagttggatctactctcttatcattttcatagcaatattttaaatagctaagaattttgtaactgactacaaagaaatcattatcgttcatactgttaccaccttttttaattcattatagcaaaaaagaagcattgccgacacagcaacgcttcttatacggtgcatccctttgagtaaagctcttggggcgcccgctcactcatgttttgtcaccttccaagtctaacacaagcaagcttgtgttgttctccaccttggaggtgaaaaacatgaacgaattaaacttgacattaataatattacttcttttgattcatgaaatcaacaagagataatctaacccgcgggcgccccatgcgcgctcgtgccgagcgcgcatcatcaaatatttttagaaaggaatgatattatggctcgtaaaaaagaccctgaaattacagagtataaattaaaaaacgggaaaaagtattttcgacttaggacttacatcggtattaatcctgaaactggtaaagttataaacgttaccagaagcaaactcaaatcccgcaaagaagccgaggaacttcgtcgcaatttaaaggcacaaggaccaagtgcattaagtcaaaagatagaaacagctcaaaagaagataactgtaagctatgtatataatgtatggcttgaagtaatgaagcaagatgtgcgtggttccacactaggacgcttaaaggacacatggaaaaatcatactgagccagaatttggtgatacttacatagacaggatatcaccggatcatgtacaaaaatatgttaatgatcttgcttcaaaatatgtaacttacaagtcaattgtcaatcagttacacagaattatcaaatatgctatcttccgtcactggtgcagtaaagacccttttgacttcgtaatcatgcccaaaaagtcagcaaaatctagtcgagataattcacgtaatttctacgaattggacgaactcaaacattttcttgatatagcccgtgattatagccgcatgaaatatacttattttctcacagttgcatctcttggatgccgtcgtggtgaagctcttgcactcaaatggtcagatgtagactttgacaaacgagttgtaaaaattgagcgaactgtcgccaaagatgataacggcaaaaagaccattgatgacgttaaaaatggagttcaccatgcagtccctatgtcagacaatctttatatgattctgaaagaataccgcgaatattgcgatgaaatcggtgaccactgtgaatggatttttcacaccaaagacggtagctacaattgggcacagcagcctgacttttggttgaagtacttgtataagtttgacaaaaagcaatgcgaaaaatggaataaggaacatcccaacgataaaaaagagcctttacgtaagataacccctcacgggctgcgtcatactcttgctacactactttatgacggtaatgaaagaattactccaaaagatgttcagtacgttctcgggcacaaaacttctaagactgctatggaaatttacacacacgtaactaaaaaacaaaagaaagatattaaaggatcaattgataatttgaacttttaaagatatttattcagtagattttcagtagaaaagcaaaaaaagcattctcagagtgacgacaaaccgcgtcaggttgggaatgctagcaaatcttatttacctttgatgtcatcatcgttcatcttcaagactgccatgaaagcatcttgaggtacttcaactctaccaactgctttcattcgcttcttaccacgtttctgtttttcaagcagcttagcccgacgatctggatcaccagtatggattttccaggtaacatcttttcggtatggcttaattgtagctcgagaaataattttagctccaattgcgccctgaatatcaacttcaaagttttgccgtggaattagtttttttagcattgaagtcatttgacgggcacgatcttgagcttctgatctgtgagcaataaaactcaatgcatcaattggctccttgttaagcaaaatgtcgatcttaaccaaatcagtagcacgataacccgtaatttcataatcaagtgaagcataacctttagtcgaagatttcaaatcatcaaagaaatcaaaaataatttcagctaatggcatgttgtaaattacattaactcggtacttatccaagtaatccatggtaacgaattcaccacgcttacgttgacaaagctccattactggaccaacaaaatcatttggcaccataatttccgcttttacataaggttcttgaacttccttatattcaccagcatctggcaaatcagatggattatcaatcaccttggttgttccatcattcataattgcatgataatcaacagatggtgctgtcatgattagatcaaggtcaaattcttgctctaatctttcctgtacaacatccatatgaagtaagcctaagaagccacaacgaaacccaaagcctaaagctgttgaagtttcaggctcaaattctaaagctgcatcattcagctgtagtttttgtaaagcttccttcaaatcttcataatcacggttgtcaactgggtacatcccagaataaaccatcggtggaatttgacgatagcctggaagtggttcagccgttgggttatcagcttgagtaattgtgtcaccaacacgtgtttctcgaacggacttaatgttagcagtaatatatcctacatcccctgcgattaaaatatccttcttaattggatgaggactagaaacaccaacctctgtgacttcatattccttgccagtattcataatttgaattcgatcgcctggtttaatagatccatcttcaattttgacagacattaccactccgcgataatcatcatatttagagtcgaaaatcaatgcttttaatggagcagtaatatcaccagacggagctggaatatctttaactaccttttccagcatgtccttaataccttgaccggttttacctgaaacttcggcagcttctgaagcatccaaacctaacatttcttcaatttcttccttagtcttaggaacatcggcagatggtaagtcaatcttgttaattactggcaagattgccaaatcgtcatcaattgccaaataagtattagccaaagtttgagcctgtacaccttgagaagcatcaaccaccattaaagcaccttcacaggcagctagagaacgtgatacctcatatgaaaagtcaacgtgtcctggtgtatcgattaagtggaaaatgtagtcttcaccgtcttcagcatgatatttcacttcaactgagttcattttaatggtaataccacgttgacgttcaagtggcatatcatctaacatctgatttttaagctgacgttgactaactgtatcagttaattctaagattctgtcagcaatagtcgatttaccatggtcaatatgcgccacaatagcaaaatttcgaatgtgtttttgatagtcttttaatttttttaaatccataaaatcgttcaccctttactatgtattaattatagcaaagctagaataaatgatgaaattgtagcatagtaaattttcaataaaatgcagagtttttagaataataattgaaaattcagcattgaatattttccaagaaaaactctaaaaatcaccaaaaaattaattgatcttaaaaaaggtttctgttgcaagtagcagaaacctttttagcatttacatattaaacttatcttttaagcgttcaaaaaatcctttttcttgtggtgtaatattgccaccaccatcatgaacaaagttggtcaaatctttcttttgcttatcattaatgtgctttggaataacaatattaactgtagtaatttgatcaccattgccattaccacgaagatatggcacaccctgtccacgcaaagtaaacttcttattaggttgcgtaccagctggaatagttagctttacatcaccatgcacagtcttaacgttaatttcatctcctaaagtagcctgagcaaatgagattggtacttctgtataaatagtctggccacgacgctcaaaatctttagatggtttaattcgatagttaatatataaatcaccatatggtccgccatttatacctgcttcgccttggccttgatatctaagttgttgaccattgtcgattccagctggaatatccacttcaatagtattcttacggtcaactgttcctttaccgccacaggttttacatggatactcaataatcacaccacgaccatgacatttgtcacaagtggtttgacgacggatcatgcccaacattgattgttgagtaattgtcatataaccagttccatgacatttatcacaggtaattggatgtgtacctttttcacaaccattaccgccacaagtttcacaagtttcgcttcgagtatagctgacctgggtctttttgcccttaatggcatccataaaatcaattgtcaattgataatccaaatcttggccacgttgtggtgcagttggatcaaccctctgttgacggccttgaccaaaaatatcgccaaagatatcgccaaaatcaccaaagccagaagtatcaaatccggcaccgccaaagccttgaccagctccaccaccaaagccaccttgaccatttacaccagcagaaccaaattgatcatattgcgcacgtttttgcttatcatgcaaaacctcataggcttcgttaacctgcttatacttttcttcagctccaggttcatggtttaaatctgggtgatattttttggctaatttacgatatgccctacttatttcctgatcactggcgtcacgatctacgccaagtactttatagtaatcttcttgtgccatctatttgaactccttgtattctcaaaagaaaagaactactcaatgggtagttcttttctccttttgtttaattataaacccattacttatttggatctactttgtggaattcaccatcttgggcattaccgttgttgccattatttgaattaccaccttgtgggccttgaggacctgcttgtggaccagcttgaccagcagcaccaccattttgttgatacaacttaacagctaagtcttgagcagccttggataaagcatctttcttttctttcatttcatccaagttgttgtccttttgggctttcttcaaagcttcaagagcatcttcaactggcttacgatcgctatcagagagcttatccttagtatctttcaaagtcttatctgtagtaaagattaattgatctacttcgtttctaaggtctgcttcttccttacgcttcttatcttcatcagcgtgttcttcagcatccttttgcatacgtttaatttcttcatctgataaaccggatgaactcttaatagtaatcttttgttccttgccagtacccatatccttagcagatacatttacaataccgttcttatcgatatcgaaggtaacttgaatttgaggaacaccacgtggtgctggtggaatatcagttaactcaaagcggccaagagtcttgtcgtctgcagccattggacgttcaccttgcaatacgtgaacatctacagctggttgattatctgctgcagttgagaagatttgactctttgaagttggaatagtagtgtttctgtcgattaacttagtgaagacaccacccatggtctcaataccaagtgacaatggggtaacatcaagtaaaacaatatccttaacatcacctgagataacaccaccttgaattgctgcacccatagctacagcttcatcagggttaattgaatggtcaggttccttaccagcccattccttaactgccttttgaacagctggaatacgagtagaaccaccatttaaaataaccttgtcaatgtcattaacagtaagacctgcatccttcaatgcattgtcaaatggtaccttagtcttttctaccaagtcagcagttaattcatcaaacttagcacgagttaaatctgcttcaaggtgtaatggaccagcttcgctagcagaaatgaatggaagtgagatgtgagtacttgatacacctgacaagtccttctttgctttttctgcagcatcctttaagcgttgcattgccatcttgtccttcgacaaatcaacaccattttcatccttaaagttcttaattaaccaatccatgatacggtgatcaaagtcatcaccaccaagatgagtatcaccattagttgacaatacttggaagacaccatcacctaattgcaatacagaaacatcaaaagtaccaccaccaaggtcgtatactaagactttttcatcttggtctttatttaaaccgaaggctaatgctgaagcagttggttcgttaataattctttgcacattcaaaccagcaatcttaccagcgtccttagtagcttggcgttgagcatcattgaagtaagcaggaacagtaataacagcatccttaacttcttcacccaagtaatcttctgagaatttcttaatatattgtaaaataaatgctgaaatttcttgtggtgtatattccttatcaccaactttaaccttataatcagcttcacccatgtgacgcttaattgaaacaatggtattagggttggtaatagcttgacgctttgctacctcaccgacttgaacttcaccatctttaaatgcaactactgaaggagtagtccggttaccttctggattagtgataatctttggttctttaccttcaagaactgcaactgctgagttagtagtcccaagatcaatcccaataacttttgacatatattagcttcctctcttattgagcaactacaaccattgctggtcttagtgttctatccttatattgatatcctttttgtaaaacctgaacaacgtgatctttttgatcatcattctcagctgctactgtttgaacagcttgatgtaatgtcggatcaaatttaacgccatcagcctcaatctcaactacaccgtgatctttcattgccttcacaagtgcatccaaggtcatttgcacgcccttctttaactgcttagacacatcatcatcggcctcaacgcttagggctctttccaaattgtccattgctggcaaaatgtccttcgctaagctttgagattcgtacttaattaattgagcacgttctttagtgtagcgattttgcatattttgaatttctgcttcactacgcaaatacttatcttcaagatccttgttcttatcttttaaatcagctaattctttagctaatttttgatcttgtttatttttttcttgcttcttttcttcacctttatcggcttcttttttagccttaggctcagaagtcttttctttttgctctagatttttttcacttggaaattcttctttactcacggctaacctcctttattgaaacttgccataataatcaagcaactttttagctagttcatttctaaaatattcaagcaacccaatcatttgtgaatatggcatattcgttggcccaagtaaagcaatagttcctttaccatgggagccaacgctgtactcagctgtcagcaaactataattttttaataaatcattgggtaattcagatcccaacttaacctttactgaataatttccagactttggatccacctttgcatccattaaattagtgaacagattattatgatcaatcaactcgtacaaagaacgaatgtcatttacatcatgttcagaagtattattgagcaaattaatctgtccatccacatacatctgctcactagctgcatcttttacgacatcttcaactaaactaagcaattcagtcacatgttcgccgcctaattcgtttttagctaattcacttagcaacgaaacgttgatttcatttaggctctttccgactaactgatcattaatcatgcggacagccttttcaatttcttcgccgtgaatattatgtggcaaagcatatacctgattttgaatgttaccatcacttgtaaccaaaattgccataatctgtcgttgagacagcggtacaattctaaatcctgtgactctaacatcatgactctcaggtccttccgcaaatgcggtatagttagttaaatctgacagaattcgtgcagcttcttgtacaatttcatttacttgatgaaaaggtcgatctaattggcttcctattgtattataaacagactctggtaattgcaacggctcaactaaattatcaagataataacgatagccctcgcttgaaggaattcgaccacttgaagagtgagttttttcaattaacccctgctcttccaacacggccatttcatttctaatcgttgcacttgaaactttaattggcaactgcttcattacggtctttgagcctactggctcatgactttgtgtaaagtctgtaattattgtttttaaaataagctcttgacgctcggtcaacatattatatcgccctcacttttagcactcacatctctcaggtgctaacagttaatatgataccagaaattagcactaaatcaagtagattgctaattttattcaaaaaatacgcacttttttcaaagtacgtagcttcttaacccttttgcttaaaataagccctaatttcttgctcatctcgttcaagttgctctttcagttcaggtaatccggcaaattttttctcacctctggtatatttataccatttgatcttcattggcttaccatagacatcttcattaaaatcaaaaatattagattcaatatatatcttcttgtcctgattaatggttacattatagccaacgctagtcatggagttataccacttaccatttactttagtcttggtagcataaactccaattttaggaatcaccttatgttctgcccaaatcaaattagctgttggatagcctagcttatgaccatttcgtttaccatgcccaatgataccactcattacataatggtgccccattaattcagtggctaatttcatctgaccatccttaattgcttgacgaatttcagttgagccaatttttctaccgttaaaagtttgctttggcatcactacaatattaaaacgccctttggaaaattggggtaaattagccatatttgcaatattcttagaaccataagtgtaatcaaagccagcaacaacggtatcagcatttaatctgacaattacattatcgacaaattcttgtgcagaaatttgactgaaatttttagtaaatggtaaaacagccaaataatctactcctaattccgccattttgttagctttttcttccaaagtttctaagtatttaaaatctcgtttcgactcataaacttccttaggatgtcgatcaaaggtcaacacaactaatgacaatttcttctgtaatgcaatttctttagcctgattaattaagcgctgatgtcccaaatgaaccccatcaaaaaagccaagggcaagcacaattctagtagataaaatattttccttaacaggatatgttaaatgaacgattttcacagctaattccttcatttcatttattcattttgcaacagcattaagcttgggcgataaagctttccttttttttcataaattgctttcacctttttattgtatcgtagtgcaacttttttcgcattagtttcaagcgaaatacccgctccatttttaactttaagccacttttcttcagttaaatcaacctgagtgtattccttaaaaaatgcatcaatcggctgtataagttcagtggcctttttcggattctcttcaatctcctttaattttactgcttgtgtaatatcaaagccagaactagctgttcttctcaaataagtcatcgttgcggggcaatctaatttttcacctagatcattaactaacgatctaacataagtgcctttgctgcatttaatcttaaaatcaaagctttcttgcccagtatttatatcaaaaactggttctttagttagatcatattgtttgacttcaacctttctctgaggtcgctcgacttcaatctcttcacgcgcatattcataaagatgtttaccattcactttaacagcagaataaattggaggcacttgaacaatttctcctacaaatttattcatattttcttgaatttctgcaccagaaaaaggctgaatcaactttttttcttttaaaacagttccagttgcatcataactatctgtgctataaccaaatagtcccgtgccaatatattcttttggcctagtatgcatcatttcaattaatttagtagcctgaccaatagcaattggtaaaacgcctgtcacctcaggatcaagcgtaccagcatgtcctatttttctaatatgtaatacgcggcgcaaatgataaactacatctgcactagtcatccctttatctttatcaataactaaaattccgtttaacataattattccctattcttttcaacaaaaaaagggcaccatcacggcgccctcttttttatttgctttcccgcttagcatcttgtttcttaacttctgcaatcaaacggtcaatcttactaccatacaaaactgaattatcacgtttaaaaattaattcaggaaccttataaacagttaatgtttgaccaagcaaatgacgcatcatgccttttgccttttcaaaacctgcctgaacctcttcttccttatgctcatcttcagttagcaggctgtaataaacagttgcatatgaaagatcattcgtacattcaactgcggtaatagttacaccacttaagcgcggatcacgaatattcttttgtaaaatcttggttaattcgcgtagaatttcaccttcaacacgaccaattctatgcttcatgttttcctcctaatagtaattacttaggctcaacttgttgcatttcgtaaacttcgaattcgtcgccaactttaatgtcgttgtagtccttaatcgttaaaccacaatcgttaccttgcttaacttccttaacatcatctttaaatctcttaagtgaagcaatttcaccatcatacttaacgataccatcacgaataactctaatcttagaatcattcttaaccaagcccttatcaacgaaggaaccagcaattgtaccaaccttagaaaccttccaagtttcacgaacagtaagattaccgataaccttttcttcataagttggttcaagcatacccttcatggcagcagtaacatcatcaatagccttgtaaataatgctgtaaagacgaatatctacgccatcggtttcagcttggctcttagcagtagcagttggacgaacgttgaacccaataataaatgcatttgatgcaccagccaaagttacatctgattcattaatggcacctacacctgagtgaatgatatttacacgtacgccttcaacttcaatcttttcaagcgattgttgtaaagcttctacagaaccttgaacatcagccttcaagacaatgtcaacttccttcatgttttccttcttcatagtatcgaagaggttatcaagagttacgtgttgaacattttcacgagacttttgtaaagcttgttgtgctctagcttcaccaacacttctagcggtcttttcatccttaaattcaactaacttatcagcagattcaggcacatcgttcaaaccagtaatttcaacaggttctgatggtgtagccttcttaacttgacgtccacgatcattagtcatagtacgaacacgaccaaaagtgttaccaacaacaatcgggtcaccaacattaagtgtaccttgttggattaaaacgtctgctacaggtccacgaccacgtgacaaacgagcttcaatcacagtaccaattgccatttcagttggattagccttaagttccatcacatcagattgcaacaagatcatttgtaataagtcatcaacattttgacctgtcttagctgaaatattaacgaagatagtatcaccaccgtaatcttcaggaatcaaattgtatttcattaattcctcagttacgtgttgtggatttgcacctggcttatccatcttgttaattgctacaattattggaacattagcactctttgcatggtcaattgcttctacagtttgtggcattacaccatcatctgcagcaacaaccagtacaacaatatcagtaatttcagcaccacgtgcacgcatgttagaaaatgctgcgtgtcctggtgtatccaagaatgtaattaagcgatcatctaatctaacttggtaagcaccaatcttttgagtaataccaccagcttcatgagctgaaacatgagtatgacgaagacgatcaagtaaagtggtcttaccatggtcaacgtgtcccatgattgtaacaactggtgggcgtttaacctggtttttagattcctttgactcttccattctcttgtcatagatattatcaatatcagagatgtcttcatgaactttttgctcagcattgataccatattcagcagctaaaagttcaattgtatctttatccaaagattggttttggttagtcatcacgccaagcatgaagagtttcttaacaatttcagctggttcacggtgaattaacttaccaatatcttgagcgttcataccttcttcgtaaactaatgtttctggtaatggacgttccttacgcttagtaagtgttttctttggcttttgctcttgttgacgttttttattcttacgccgctttctctctgaacgatctgaatggtcactacgaccattgccaaattgatttttacccttgcgtcctggctttcccatgttgcgaccacgattattgccgcgtttttcttccttaggagcctcaggaatagtaacttgaactagttctttagtcgcttcaggctgttgcttcttcaaacgagctggagaaggctttaaaatcttaggaccaataactttcttttctactggttctgctttcttcttgttatctttgtggttgcttgttttcttattatctttcactggctgttcttgttttggatgtcttaattgctcatgatattcttttctggctttttgggcttcacgattaagttgcccttcttctgcccgttgcttttgtttaaattgttgtaacaaagcagctgcctttggcttacctgtattatttctacgatcatttttattctcatgaccgtgattatttgaacgacgtttattattgcgtctcttagaattcttagaactattattatcttcttgcttcttttcatttttgcgaatagaagaaacagagatttttattttattctttttattagaagattttgcagcaggagcggagttttggaaactattctttaactttgcaacctgtgaatcatctactgatgacatgtgattctttacatctaagcctaaatcctttgctttttggactacaactttgttatcaacgccgacttcttttgcgatttcataaattcttttctttgccatccaatcacactccttcatttatttttttaactaacgccttagcaaaaccagcatcagttaatcctaaaactttgcgttttttgccaattgcctttgacaattcaatggcagtaaacatagttatcataggaatattgtcttttctggcagcgcggtttactttttctgccgtgttgtcttgaacatcactagccataataaccgctttgattttgtgcttattaagttcattaatgactgtctctgtaccggtagttaacttaccagcacgctcagctaaacctaacaaattaattgctttttgtctattttgcaatcttatttatcaccaaataattcttttcttgccttttgatgatcaacataagagtaaagctcatcgtaaaaagtatctggaactttcgcacctaaactacgttctaatacattcttctctttagcagcttcaatcttacttggatcaagggaaacatatgcgccgcgaccagcctttttacctgttggatcaactgacacatttttttctttatcgataacaatacgtactaattccttcttgggctgcattgtatcggttaataaatccttccgcattgggatttttctttttttcaaaaaatcacctattcttcagttttatcttctttacttgaatcttctacagtagttgtatcatctgagctttcaacgtcagcagcgtcatctgtactttcaacattttcagaagtttcgctactatctgcagcatcagctgtatcatttgttttttcatctacaaattctacttcagattcaggacgaatatcaatcttatagcttgtcaaacgagcagctaagcgaacgttctgacctttcttaccaattgcaagtgataactggtaatctggtacgataactaaagcacttttttcttcttcatcatcaccaaattgaaccgcaatcacttctgctggatttaatgcattagcaataaagtcagatggatcttcttcatacttaacgatatcaatattttcaccgccaagttcgttaactacattttgtacacgagcacccttttggcctacacaggtacctaccggatcgatgttaggatcatttgacttaacagccatcttagttctgtcacctgcttcacgtgcgattgaaacaatttcaacggttccatcataaatttctggaacttcttgttcaaacaatcgtttaaccatgtcaggagcagttcttgagactgtaatttgtgcacccttgctatcggagccaacatgagttactagtacacgaatctggtcttggggattgtaaacctcatttggcatttgatcacggtgaggcataacagcttcaacattaccaatctttacataaacgaaacgattgtcgcgtctttccacggtaccagtaaccaattcatcttcatattgtgaatattcatcaataatatgttttctttcggcttcacgtagacgttgcatgataacttgcttagcagtttgggcggcaattctaccaaaatttttaggtgttacttcaaaacgaatttcgtcgcctacttcataagcacgattaattgttaaagcatcctttaaactaacttcaagacggtcatcttgcacttcgtcaacaacagttttaactgccattaccttgaagttaccttttctttcatcaaaatcaacttcaacgttttgtgcttgattataattctttttgtatgcagctaccaaagcggctttaattgcatcaacaataatatcttgcttaatgcccttggtattttccaaagtagcaaacgcttctagcatttctttagacataagtttttgatcaacctttctaaaattcaattgcaaaacgaatatttgcaattaacttacggggaacagttaatgtttttcgtcttgtcttatcttttatttctaatacaacttcgtcatcattataagacttgagtgtaccttcatacatttttttattctcaatcttttgataaagaccgacatgaatgtaatcattcagagctttttcccaatcagcttttgttttgattggtcgttctgcccctggagatgataattccaaaacatagggatctggaagtggatcgggatcaagagcatccagcttttcggaaacaagttcacttaaagctgcaatctcatcaatgtcaataccgtttggttggcgatcaacataaatgcgtaaataattttgccctttttctttaacgtattccatatcaaccaacatgtcaccatgttcatcaataattgtttcgacaactggacgaacagaatctataactttagacaaaaattttcctccgtaataaaaagagtgagcatcactgctcactcgaatttacctattcgaacttcatacgtagtataccatgttttacctgatcttgtaaaatttaactatcagaaaagtgataattgattttcatctggcatcccttccaagacaccattttcttcgaaataattcataattgtttgtgatactttaccgcgcttagctaaatcttctttagacaaaaacttcttttctgcacgagcagctacaatctgcttagctgcattatcccccaaaccaggaacagcattgaacggtgctaaaattgtatgcttatctaagatcttaaagtcagttgcttcagattgatcaatatcaaccattttgatcttaatccctcgttctagacattcattagctatttctagcacggtcatcaaactcttatccttagctgatgcatcgtttcctttatcctgaatttccttcattgcagccttaacagtattcttaccatgactcattgcaaccaaatcaaatagatcggcacgaactgaaaagtaagctgtgtaatagatttcaggataatatactttaaaccaagcaattcgtagagccattaaaatgtaagccgtagcgtgagccttagggaacatgtacttgatcttcagacaagaaggaatataccaatctggaatattcttatttttctttaaaatagccatattttcatcgctgatgccacgaccatgacgaacggattccattgttgaaaaggcaacttctggcttaacgccccagtgaattaagtccatcatgatgttgtcacgacaaccaattacatttttcagtttgcaaattccttgattgattaagtcctcagcatttcctagccatacatcagtcccatgggacaaacctgaaatctgtaataattcagaaaatgtcgttggcttagtctcctcaagcattcctctaacaaaacgggtaccaaattctggaacacccaaagttccagtttctgattgaatctgctctggagtaacacctaaaatatcaggactagaaaataatgacatgactccagggtcatcgggtggaatagtcaatggatcaatcccagacaaatcctgcaagtgacgaatcatagttggatcatcatgtcccagaatatcaaacttcaaaatattatcatgaatagagtggaagtcatagtgagtaatcaaccaagcggcatttacatcatcggctggatacgataccggcgtaaaatcgtaaatgtccatatcatcgggcactacaacaattcctgcagggtgttgaccagtagttcttttgacaccacggacaccagctgccaaacggtctaattccgcatttcttagctttaaatcatgctcttcatcgtagtgtttagcataaccgtaagcagtcttatccgcaacagtcgcaatcgttccagcacgatatgaattatctggtccaaacattactcgaataaaattatgggctactggttgatagtcacctgagaagttcaaatcgatatcaggaaccttatcgccgtgaaatcctaagaaagtcgcaaatgggatatcttgtccatctttaactaatggagttccacattttggacaatctttatcaggcaagtcaaaaccagaaccatattccccattttcaaagaattgtgaatacttacagttaggacaacgatagtgtggagctaacggattaacttcagtaattcctgacatcgttgctactagactagagccaacagaaccacgagaacctaccaaatagccatctttatttgacttagctactaaacgctgagaaatcaagtaaataaccgcataaccattcgaaataatggaatttaattccaaatctattcgatccttaacaatcttcggtaatggcttaccatataattcataagccttatcataggtcaacttcttcatttcttcatcggcatgttcaatatgtggtgggtataacccatctttaattggctgaatttctgacaattcatcagcaattttattggtattgtcaataacaattttcttagccacatcttcgcctaagaatgaaaatgcatctagcatttcctgtgttgaatagaaatgcaaatctggctgtggcttatttcgactagggtttgatctctgagccgcaatcaagattttacgataaatagcgtccttttggtcaacgtagtgggcatcgctagttgcaactacaggcttatttaattccttccctaatttaataatattttcaataatttcatgtaattgatcttcatccttaatcaaaccatcagcaattaattgcgaataggttgctggaggttgaacttcaagataatcataaaatttagctttttctcttgcttcgtcgtaacctttttgcatcattgcgataaagacatcgccttgccaacaaccagaaccataaagtaaaccatcatgcaaacgagccaaatctgacttcggcgtacgaggaatacggaaaaagtccttcgtgctggcaattgatactaatttgtaaagattctttaatccagcttgatcctttgccaaaactgtcatatgggaaggacgggctcgtttataaacttcaccatgtgctgcatagccattcaaattattcaaattattttcatgatactttttattaaaagcatctaacaatttaaacattaaatagccagttgcttcagcatcctgatttgcccggtgatggtgttccaaggaaacattatacttcttagctaatgaatctaaagtatggcgactctgctctggatgtagtaaacgcgatacttcaagtgtatcaactactggctgagtaatttcttttagccctgcacgtcttaatgctgcattaacaaacccaacatcaaattgaacgttatgtccacacagtggtcgatcgccataaaagtcttggaattgcttaatgacaactgcttcatcatcggctgcgccaaccatttcatctgtaattgaagtcaaattaatagtttgctcacttaaaggatggtgcggattaatgaacttatcaaagcgttcaagcacttctccgttcttcatcttaaccgcaccaatctcgataattgtgtcgtaaacagatgacaaccccgtagtttcaacgtcaaaaattacaaactcgcggtcttcataggtcatcggtgcaggattcaaaactagtaaagcatgatcatcaatcatattagcttctacaccatacaatattttcatgtccagtgctttaccactgctatatgcttcagggaatgattgaacatcaccatgatcggtaatcgcaattgccttttgtccaaacttcttagcagttttaataaagtccgtcggagtattagttgcgtcaacctgactcatattagtatgaacatgtagttcaactcgtttaggctcaccttcgtatttttcagttcgcccaacatgctcgacagtctctaagctactaatattaaaaactacatcatgtatatattgatcatcagcaactgacccctgcattttagcccaagttcctggtttaattgcagatagctcttcaatttcatctttattagaaacaaatttcttaaatgcaattgaatcactataatccgtaatttcgccagaaaaaatgattgcaccagatttaagctcacgagtttcaacattaaaaatatttccctcaattactacattacgtacgccatcttccagctctttaatttgtgtaattggagcattttcatctaatttacgtttaccataattagtacgtctagttggatactgtttaggttgttgcggtttaggtttgtctggcgtcttctcaaagacttcctgcatgcttttttcatgctcttgttgcaactcctgcaaactttctaaattgtttttagaacttgtctgatccagctgagttataaatttcaaattaaagaagccataatcacgcatcttttcagctaaatcatctaaagccttctgctcaattaaaccatcaatcacattattatcaactggaataacccagcggccatcaacttttttaggtttttggccagccaaaaattcacgagccacaggttgcaaaatatttgaattttgaactacataatgccaataatctggtaaatattgatcagaaccatcagctgttccaacataaaatcttacatttacaaaagaagaaaaagtttcttctacagcttttcttaatgctacataggtgtcatacatcaagggagtatcaaaaaaaacgtggatatcccacctgtgttctttagcgtaaacatccacgttttcaattttccctttttgtagaagcgcattgtcttcaaaactatcaggaaattgaacctgtttgagcaattttaagaaaagatcgtttttatttgccacaaaaattatcctaactcttgatttacaaacttatctaattcatcaattgacatttcggttgctttgtcatcagttggtcgcttaacttcaacaatgccatcagcagccttcttaccaatcgtaattctaattggtgcaccgactaaatctgcatcagcaaacttaacaccagcacgctctttacgatcatcgtataaaacatcatacttttcactgaatttcttttcaagtttttcagctaattcagtttgatcttctttattcatcttcatttgaacaatatgtattgcaaatggagcgatttcctttggccatgcaacaccacgttcagttaagtgttgttcaacagctgctgataacattctagtaacgccaataccgtatgaacccatgatgacaggctttgctttaccattttgatctaagaaatctgcacccatggtcttagtgtaataagtacccaacttgaaaatgtgaccaacttcaattgaagtagtgaacttaagcggtaaatgatcaacaggatctggttcaccttcgttagcagtccgaatatcagcaaattcatccaccttgaaatcacggtctaagttagcattttcaaattgataatcggtttcacctgcaccaactacaacgttgtaaagattcttaacagtttcatctgcaataatcttatcagcccaatctgcattaacaggaccaacgccacccttttcactaccagtgatttcctttaaatcagcagtatttgcttcatgaacctcatcagcgtcaaggatatgacccaacttaacctcattaatttgcttgtcaccacggattaatactaaaactttttggtcatcagcaatgtataaaatacttttaacaattctagtagctggtacatcgaggaatttagctaatttttcaattgtatcgcagcctggcgtagctaccttagttaattgcttagcatcttctggttcttgcttgaaagtatcaatactcttagccatttcaaggttggcagcatatgttcctttttcattagtagcaattgtatcctcaccgatagcagcaggggcttgaaattcagtagagtttttacctcccattgtacctgagtcagcaattacagggtgaacagtaacaccggcacgtttaaagatacgcttatatgcatttttttgatcatcaaattgttcatccaattgatcacgagttgcagcaaaactgtaaccatcaagcattacaaattcacgcccacgaagaaggccaaaacgaggtctattctcatcacgaaacttagtctgaatttgatacaaagcaagtggcatttgtttgtaactctttaagttcttagcaataatttcggtaaaagtttcttcatgtgtaggtccaagcaagctttcacgtccatgacgatcttttaacttgaacatttctgcaccatatttcttgtaacggccactttcttgccacaaagttgcaggaagtaaatgaggcataatcatttctggaacattaattttatccatttcttgttcaatgattccctcagccttgcgtaaaacacggtagcctaatggaagataagcataaactccagctgtgacttgacgaatatacccacctctaatcatcagcttatgactttcagccactgcatctgatggtgcttccttcaaagttggcataaaaaattttgattgacgcattcttatctcctaaagtaaaaaatataattatttaataaaatagcgatagatatcgttacctgtaactgcaataattaaaactaataataagccgaaaccaattaattcaacaattgcctcatgttcttcagaaatcggtttaccgcgaactaattcaattaagttcaataaaagtttaccaccatcaagcccaggaattggaattaaattgacaattcccaaattaatcgaaatcattcctaaaaaggctaatacataagtaaagcccatttgtgaaacttgtgaagtttgagaataaattccaactggacctgataatttattcaaactaaagtggctaaataagttacctacggctctgaaaatcagaccggtagttgaaatagctgtatcccagccacgttttaatttaacaactgcattctcattgctcttagctacaataccaatttgataaactgtttgtttttgaattttatgagcttttggcttaactgtaactttcctaatttgaccatttttctttaattcaaagtgtaagaccttgcctttactttgattaatctgctgtgacacttgatcaaaattattaatcttttgtccattaattgccacaatctgatcaccagtcacaatttttgcatcacgcgctggtgaattagcctgagttgatccaactgtagttgttgctggacctggaactgtaaatgtccagattaaaaatactacaaacccaagaagaatgttcataaaaggtccagcaaaattagttgccaacttttgccaaacattagcttgattaaattgtgtatctcgaggcgcaataattaattcagttccgtttttttcaataatagttgcatcatgagctacgtgataagttactggatcattttcatcgccattttcgtaacccttaattattaaatcgtctactagatcagcctttgttacttgaacgggaattccttcaattggtatttcgctttctgaagcatcaattctcactacttcattttgttcattcaattgtaaaacaaccgtcataccaggatccagcttgctttcatcgtcagcgcctgctaaacgaacatacccaccaagtggtaaccaacgaatggtataagtggtggggttacgtctaatttgaaaaagctttggacccattccaattgagaattctctaaccaaaatacctgactttttggctacgataaaatgcccaaattcatggacaaataccaatataccaaagacgacgataaagattagtatacccttcaataaaaaattctcctaatgaacaatacctaaaattgtagccactactggcaatacaaacagcatactatcaaagcgatccaggataccaccatgacccggcaaaatctttccggaatctttcacaccatagaaacgcttgtaagctgattcaactaaatcacccatttgaccaacaattgataagaaaaaggccagaataatcatcgttaattcagatacaccaaagttaatacccaagctgccaagaattgccatatagatggcactacaaattaaggcacaaacaactgcaccgatcgagccctcccatgttttattaggactaataactggccataatttatgttttccaatcttacgtccaatcatgtaggcaccgatatcagtggaccaaacaacaacaaaaacacaacccagcaatgctaaaccgttttgtgggtatgctctaatggctgccatatagtgaaaacctattccaatgtaaagtgcagccaaaatatatacacctacatcatcaaaagtggttttattctttgaaagaacagtccaggtcaagaacaacataataattccataaaacacacctaatttagtgatatttgaaggaaatactttaaagaatgagtctggaactgtccaggttaaagttgcaagtaaggctaacaaaaaattaaaagaaactaagatttgtttcttcattaaaaagatttcgctaatgccaactgctgcgaataatacagtcagccaatccatccaaaggccacctgcgagcacaattggaataaaaagacataaggcaataattgccgtaattgtacgttgtttcatatttaactatccgattcgtctactttaccaaagcgccggttacggtgcttataatcttctacaaatttttttaaatcattttcatcaaaatctggccaatttttttcgctaaaggcaagttctgaatatgctaattgccataataagaaattagaaattcgctgttcaccggacgttctaattaataaatccggatcttgatatggaccaaagtttttagtcatcaaatggtctgaaatcattttttcagtaatttcttcgctttttagtgaaccagcttcaatcattccaccgagctcctgcatagcagacgtaatttctcttcttgacccgtagttaaaagcaaaattcagaattaagcctgtattattggccgtctctgacattgcacgttgaacaatgcgataagtcttttcaggcaattcatccaaatagcccatgatatttaccttaacattattttccatcaatgttggcatgtatttatcaaaaaagcgaacagggaggttcattaagtaagctacttcttctttaggacgagcccaattctcagtagaaaaagcataaagtgtcaaaactttaattcctaatttatcagcagctaaagtaatccgctcaacattatccattccctctcgatggccaacaaaacgaggtctatgcctcttttttgcccaacgtccattaccatccataataatggctaaatgatttaattcattatccttattactcatctttaaccttgagtaatttccttacgcttttcatcagcaagttggtcaatctgcttagcagcatcatcagttactttttgtacttgcttttctaagttacgttgttcgtcttcagtaatatcaccattcttttcatcttttttcaaagtattcatggcatcacggcgaacatttctcacagcaattttagcttcttccgcaaattttccaacttctttggcaatttcttctcttctttcaccagtgagttgagggattactaatctaattaccttaccatcatttgccggagttaatcctaagtttgaagccaacaatgcatgttcaatatcatctaatgaattttgatcatatggagtaataagcaatacacgtggttcaggaatggtaatactagacatttgagtcaatggagttggtgccccatagtattctacttggacattatcaagaagagcagcgttagcaacacctgcacggatagaagctaatctcttttgataaaccttaatagaatccgtcattttagtttttgctttttcaatagtttcgttattcattatttatcacctctaataacagtaccaatattttcacccaatacaaccttcttgatattgcctggagtattaacgttaaagacaattaatggaatttcagtatccattgaaagtgaacttgcagttctatccatgaccttcaagtcttttgaaattaaatcaagttgagttaattctgagaacttagttgctgaaggatcagtctttggatcagctgagtaaacaccgtcaacaccgtttttagccatcaaaattacatcagcaccaatttcagctgcacgaagggctgcagtagtatcagttgagaagtatggattaccagtaccaccaccaaaaatgactacacgacccttttcaaggtgacgcaaagctcttcttctaatgtaaggctccgcaatctgtctcatttcaattgaagtttgcattctagtaggaacacctattttttcaagaccatcttgcaaagctaaaccattcatgatagttgctaacatacccatgtaatctgcttgagcacgttccatacccaacttagcgccagtttcaccacgccacatgttaccgccaccacagacgataccaatttcaacacctaaatcatgaactgatttgatttctttagctaagtgaccaattacagtaggattaatccccgtacccttgtcacctgctaaagcttcacctgatatttttaaaatgacacgtttatatttaacttgactcataatgacctcctctaatagctttaattattctaccatatctaatgccgcaatgtcttttaacacttaaaacactacaaaatttttacaaaaaaagaaggagcacacggtgtactcctcctttctatgataattatgtaataatgactacttcatttgttcacgaacttcagcagcgaagtcttcttgcttcttttcgataccttcgccaacttcgtaacgttggaaagcaactaacttagcgcctttttccttcaaaaattcgccaacagtcttgctatcgtccataatgtagtcttgtgataacactgcaaattgcttgtcaacttgagtattatcatcaataaagcgttgcatcttaccaggaataattctgtcccaaatcttttctggcttaccttcttctttaagttcagccttgatgtcttccttagccttagccaaaacatcatcagttaattgcttagctgaaccgtaaacaaggtgaggtaatggtttcttatgtaccaatgcacgactttcattgtcttggtcaatcttgtggttcatcacagctaattgatcagtgataaattgatcatctaattcgtctggtgaaataaccttagggctcatagcagcgatgtgcatagccaagtgcttagcagttgcagcatctgcaccttctaaaacagtgataacaccaatttggccaccattgtgttggtaagcaccaaattcttggtcgtcattcttttcttctaaagcaaaacgacgtaaaacaatcttttcaccaattgtagcagttgcgttaacgaatgattggtctaaagtagtaccatcagccatcttcaattccttagctgcttccatatcagctggcttaccttcagcaatagtcttagtagcttcatttaccaagttaacaaacttgtcgttttgagaaacaaagtcagtttctgagttaacttcagtaatagctgccacattaccattaacgtaaacgccagttaaaccttcagctgcaacacggtcagccttcttagctgccttagccatacctttatcacgaaggtattgaacagccttatccatgtcaccgtcaacttctactaatgccttcttagcgtccataacgccagcaccagtacgttcacgtaattctttaactaattttgcagtaatttgtgccattaatagatcctcctacggaactaatagtaaaatctagtcttctgggttttcttcagcgctaacgatttcttctgaaccgtctgcattttccttgaagtcaacttcaactgattcatcatcttgaccttgttgaccttcaacaacagcatcagccatagcaccagcaatcaaacgaatagcacgaatagcgtcatcgtttgatggaataactacgtcgattgggtctggatcagtgttggtatcaaccatagctacaactgggatacccaaaatgttagcttcgtgaacagcaatcttttctttcttagggtctactacgaacaatacatctggaattcttggcatatcttcaataccaccaaagaatttttcaagcttgtccatttccttagttaagagagcaacttccttctttggaagaacatcaaaagtaccatcttctgacatttgctttaattgctttaatctcttaatacggctttgcatagttgaccagttagtcaaagtaccacccaaccaacgttggtttacgtagtattgacctgcacgagttgcttcttcagcaattgaatcttgagcttgcttcttagtacctacaaataagaaaacgccaccgtcttgggcaacagccttcataaagttgtaagcatcatctaacatcttgatagtcttttgcaaatcaatgatgtagataccatttctttgagtgaaaatgtaaggagccatctttgggttccatcttctagtttggtgaccaaagtggacaccagcttcaagcaattgcttcattgtaacaacgtctgccatatttaaattcctcctatggttttatatcctctcaagcgttcatttcatcatctaaccactaccctgggcaccacgatgatgattgctcttgatgtgttttaagtttcatatgctgacacagcatactcaaatattctacaagaaaagattacagtatgcaaggattaaaactttatattatgctcatgcaaaaatttttccttccaagcacgtgaatgatgtttaaaccaatattctcgtttcaaagctaaacgcttatcgtcaaactgttcatgataaatcatccgtacaggacgccgtgttttagtatacttagctccttttcctaaattgtgcattttcaaacgatgttctaaatcattagtaaaaccaccataaaaactgccatcattacacagtaagacataaaagtaatatttaccctgtgcttcatgtttagctttgtcatctgcagtttctcgtgagattcgctgtactaatggagtgaagtcgccatttgattcatgaacttcaacagcatctttcaaaacagttccatcagttccagtatgcttgacggcttctacaataattaaattagcatcttcaccgcgatgtggcacaaatggctgcaccattttgatgcttaagtcatgcttcatacaataataagcaatctcacctaagcgctctggccgatgtaccattaacattttgcctttcattttaagtaagccactagccacttcaattatttgctctaaattaatcaaaagttcatggcgagcaattgcttttttacgatctggattaacttcatgtcccttaggtgctttaaaatatggtggattaactgttactacatcataactatctttccgcaaaaaatgtcctgcatttagcacattatcctgaaaaactgaaatacgattttccatctcattaagcttgactgaacgaactgcttgagaataaacttcgttttgaatttcaattgcatcataatgggcacgattaaaataagccatatagattgtagctgcacaatttcctgcacataaatcagcaaccttatctttatcacggatcaagtctttagcccaatatgctaaaaataatgtatccattgaaaaactaaaagccgttttatcttgaataatacgaagattatcgctatacatgtagtcaattcgctcattatctttcagatctaccataaaaatatttgcctttctcgtcattatatttttataatagcttacatcaaatgaaggaatcaatgaggagacaatgttttacaaaattatacgtccgattgtccgtttcatcgtttgggtgttaaacggtcatctacacattcatcataaggatcgcttgcctcagggcaattatattttagtagccccccaccgtacatggtgggaaccactgctttttgcactaggtgctagtccaatggaattcatgtttatggctaaaattgaattattcaaaaatccggttttacgatttattcttgatcatgctcacgctttcccagtcgatcgaaataaccctggaccatcagccttaaagattccagttaagggacttagagaaggaaagttatcattaattatctttccttcaggcacgcgacattcagctgaattaaaaggtggagttttattaatttccaaaatgtcaaaaaaaccaatggtacctgttgtctaccaaggccctttaacttttaaaggactgcttaagcgcaagccattagaagttaactttggtgatccaattaccattgatcgtaaaactaaactaacccatgaaaatgaacaaattttatttcaacaacttgaagatgcttggaacaaattagataaggaaatggatccaaatttccactacgttgctaaataagtaaaaatcagtataaaacaaatattgctttatactgatttttctttacctgtgcaatttaatataagtgttaaaataatttttaggttttaaatattggaggaaaaagcaattgttagaaaaaactttttacaaaatgatgcttagtaaatctttccccttttctgttaaggtaacctactgggacggtaagagcgaagtttatggcaatggtgatcctgaaattgaaattgtttttaatgaaaagattccaatgagtgaaatcactcgaaatgcttctctagctttgggcgaaggattcatggataaaaaaatcgaaattcatggtaatatccaaaaattgcttgttggtgcttatgaaagtgctgattcattcatgcgtgcttctaagttccgtaagtttatgcctaagcaaaaacacacggaaaagcaaagcgaagaagatattcaaagccactacgacattggtaatgatttctacaagatgtggcttgacccaacaatgacctattcctgcgcccacttcgaagatggcaataaagatgatcttgaacaagctcaaattgcaaaagtacatcatatcttaaacaaactccacccacaaaaaggcaagaccctacttgatatcggatgtggctggggaactctgatgcttactgcagctaaggaatacggtttaaaagtcaccggtgttaccttaagtgaggagcaatttaaattagttcaaaagcgaatctacgacgataacttacaagatgtcgcaaaagttagattacaagaccaccgtgaacttggtgatcaaaaatgggattacattacttcagtgggaatgtttgaacatgttggtaaagaaaacttacctaaatactttgctgatgtctacaagtaccttaacaaagacggtgttgcattaatccatggtattacccgtcaacaaggtggtgccactaatgcttggttaaacaagtatattttccctggtggctacttaccaggcttaccagaaattgttactgacatcatcgattcaggcctacaaattactgatatggaaactcttcgtcgtcattatcaaagaaccttggaaatttgggataagaactttaatgccgttcgtcctgaagtagaaaagaaatttggtgaaagattctgtagaatgtgggatatgtaccttaatgcttgtgctgctagtttcgagtctggtaacatcgacgttatccaatacctattgacaaagggaccatcaggtaaaactttaccgatgactcgtaaatatatgcttgataaataattacatatcaaaaatagtcactagaaattgaaatccagtgactatttttttattcaattttaccaaatagtaatccgttcttctggatcaagccacatgccatcagttggcttaacgttaaatacatcatagaatgcattttgacattgaaccggaatgtttactctcgttggttgtggcgcatggacatccgtttgaacttcagtcttaattgcctcagggcgttgtttctgcatccagctacgagcataattctcaaacaaatctttcaaatccgccccatcattttccccagtttgaactacacaagcaaggccagctagatcagcaatattttcaccaacaacctgcttaccattaatcttagcaggaccatattgtaagccatcaaaaatatcaaccatttgaccaactcgtttattaaactcagcaaaatctttgtcagtccaccaattgttcatatttccatgttcgtcgaattttgctccactattatcaaatgcatgtgatacttcatgcccaatagttgcaccaattccaccataatttgcaccacgagattgattaatgtcataaaatggtgcctgtaaaattccagctggaaaggttaagtcatttctttgcggatcatagcacgcattattcaaattacctggcattagccaaactgaacggtcaactggcttagttaacttattaagcatatatttcgttcgtacagttgacattgccgcttcattttcatacaagctctttttcggatcaacttgtaataagtcaaagatttcttcgatcttgtctgggtaaccaatttttaaaaccaacgcctttaacttaatcacagctttctttttggtttcagcagaaagccatttattagcattaattctttcttcatataccttaagcatccgttggatcatgtcttcaacatcttttttggcttttgccccaaaatatttttgtccataaaagataccaactacttcatcaaaagcaccattagccaaacgataagcttgcttaatttgtgatggcaattgtggcgtaccagtaactgcttgaccaaaaggaaacgcagcttcacgaaaatcttgtgacaataatttagctacgctgttaatgtatttaactagcatccatcctttaatctcagcaaaattcccttcattcaataattcttcagcatgattgagaaaacgtggttccataacgataattcgatctggcttaaccggtaaaatagaatccatgaaatcagccatgtcaaatgatttaaattttttaataaagtcagcatatgttactggattataaattgcggcataatctgaccattcctcagttgacttaactaccttagctaatttttgatcaaaggccaaagcgctttcaacataaactcgtgcttcgcttttaccaataccggacattgtcagtaagttaatactttggtcttgaagagtatccaaaagttgcttagcatcagcagtttgatacgtcgtagtatctggtaagaatgtgcttgggccaccaaaatggagtacgtttacatcagtgttcttcatatcggcatcgacgtcaaatacaaacggtaaagcatatggtcccataaacaaatcggcagctttttgtttaaaatcattaaaattatttaaggatattaatttttgtaaatccttttgaataggattagctttttctgcatccctcttagcaaaatcttttgcaatcttatacaaaataactgccttatcaaagtctttaatctcaggcatcttttctttgcccgccgcaatgtccgcaaagtctttcattactcgatcttcgattttttggtcaagctctgaattgacaccagcagatgtcttatcagcaggaatttctgctttagatagccattctgagttaacagccaagtataagttatcttgtggcttagcatttaagtctggcttagaaacgtcgccagctccaccacgaactgtaaaatatcttttcatttttgctccttataaatattcataattatttaatactttttaactattatatcaaaaaaagacgttgctactacacaaacgtcctgaaaaacaattagtttttattttcattattttgcaaggtatacaaattatagtaataacccttttgtgcaagcaattgatcatgcgtaccccgttcaattatgcgtcccttgtctaaaacaataatttgatccgcatcggcaatcgtagaaagacggtgagcaatagctaatgtcgttcgaccctttctcagccgctttagtccttgctgaatcaaagtttcagtctcggtatcaacatttgctgttgcctcatctaaaaccaaaatcttaggatctgtgactaaagttcgagcgaaagaaattaactgtctttgtccctgactaaattcttctccgccttcaatcactttagcatgatacttacccggcattctttcaataaagcgatccgcttggactgccttagcggcgtctttaatctgattatcagtaatttgattattatacaaacgaatgttagatgaaatatctccataaaacataaacggttcttgcaataccaagccaagtttttttcttaattcttctttaggatatttacgaatattaacgtcatcaatcaagatttcaccttgaccgaattcgtaaaaacgcatcatcacgttaataatcgagctcttccctgacccagtatgaccaacaattcctaaagtttcacctggattaactacgaaagaaatatcatgtaaaatttcatgcttgccatcataagaaaagcttacatgtttaaactcaatttttcctttagtaatcgtcaatcctttttgagcatcctgctgtggttcatattgggtatcatcaagaatccgaaaaatccgctttcctgcaacaatcccatcttggaaaaaggtcatttgatccatcacagttgaaataggattaaaaagttgcgaaatgtattgtgaaaaggcatagactacaccagctggaacaaaagtttcacgtaatggaaaaccaaagtacattaatgaaatggctaaagctaacgaataaagcagcgatgtcaatggcgataataacaatgaatttactcggatcatgttgaagcgtgtattcattaaaccaccattttcgccttcaaaattattagtcatccgtttttcttgattaaattcttggataaccgatactccttcaattgattcatttaagttagcgttaattcgactaagacgctcacgataattacgataaagacgtgagcttttttgcgaataaagccaaacaactaataataaaatcggaataaagagtaaaatcaaccacccagcaactatattagtagtaaacatcgctactaacgcagtaatcaccgaaaaagcaccaatcacaaaagttgatagcaccgtcaaaaaattactcaaagtcatcgtatcattagtaactctagaaacaattgagcccgcaggagtttgatcaaaatagcgcatccctagcttatgcagtttgcggtacaatgcccttctgacactctctagcgttttttctgatcctaaagcaaagaaatattggtaagtaaactgaattattgcctttaaaattgagcctaaagcataaagaaaacctgcaaacaaaatcacctgcactgttgtgctttgatgcaatagaaagtgatctaagaaatattgcaagccacgtggcaaaagaatattaattacactaacaataaatgcaccaactaaagcaacaatcatttcaaatttaaattgcttaacaaagcccattaaacgcttaaaaatatcaacttgctctttaaatggtatcgccttagaccaaacagattcatgctgttcttcgttattattcatctgtatcttcacctactttcgcttgtaattcctgtctacgccacatttccgcataccatccatctgcagctaatagttgttgatgattaccacgttcaacgatttgaccatcctttagaaccaaaatcaaatcagcatccatcacggaagtcaaacggtgagccgcgatcattgtagttttatcagctctctcttttcttaatgatgacaaaatctcagtttcggtctttgcgtcaactgctgacaatgcatcatctaaaatcaaaatctgactatcttttagcaatgcccgagcaattgacattctctgtctttgaccaccagaaagagataagccattttcgccaactaaagtttcatagcctttaggcatttgcaaaacatcatcatgcaaatcactcttcttggctgcagctgcaatatcatccttatctacattttcagaagagaaagcaatatttttgccgatactagttgaaaacaagaaattattttgaggaacgtaggagatctgactgagtaatacctttagttgaatatttctaatatcttttccattcagagtaatttgaccatcatactgatcaaattctcgcaaaagcagttgaataattgtggttttacccgcaccaactcgaccaactaaccctaaagtttgcccaggttttaaagtgaaattgacttgctttaaaactggaatatctggctcatctggatatgcaaatgatttaatgtcatattttaattcaccttgcaaatcttgagaagtaatatttggatctgcatgtgcatcagtaatcaaaggcctttcatcaagtaacttttctacacggtcataacttgcactaccacgctctagaatattaaacaaataaccaatagcaaacattggccaaaccatgttagaaatatacgcgataaaagaaaccaactggccaattgataaaatcttgttagttactaatagtcccccataaataatcgtgatcacatacgtagtaccgataattattgttcccagtggatcaaataaggaatcccagacaaaaacttttttattaatattgatcgtttcatcgaccatcttgtcaaaagcagcagtatcttctttcccttgaccaaaagttttgagcaccttaatcccagatacagattcctgagttttattattcagcttagagaatgcagcctgtgacttatcaaaagcatcatgtaagtgatcacctaatttccaagctcccaatgccaaaaacggtaatggtaataaagctacaatagttaaacgccaatcaacaaaaatgatcatggcaatcattgttgaaagtcccataactaaagaatcaaccaatgttaaaacgccatcaccagcaacgttctgaatggcagaaacgtcattagtagcatgagccattaaatctccggttcgatgacgctgataaaaagtccgatccatcaccataaaatgatcaaataactttgaacgcatttggcgctctaattctgctgcgccgccccaaatttgtttacgccaaaaatagcgcaaaatataaagtgtgaatgcagcggccacgacagcaatgatcaacattccatattgtccccaagagatgtgaccttgatccaattgatcggccattaagcctaatacacggggcggtaccaagttagctaaagaagttaacgccaaaaaggtaatgcctatgatataacgttttttctcagccttaaaaaaccaccctaacttactaaatattcccatatttcacctcattcttaaaagtgcacaaaaaagacgaaggaaatccttcgccttttctaacaaaactaattaaattaattacttttgttggtgcttcatcatgttcattacttgatgtaccttcttatttgaaggcttttgacccatttgggacatcatagcaacgatcatatcttcactaataggaggattttccttaaagtacttcttcatgtaagctcttgcaccgtaaaaacctgctacagcgccaatcaagagcgcaatgataattaaaaaaattgctaaacctaaattcatattaaatcctccatctaactaacatttatatcttatcatagttctctaactttttgaaagaactaattaatcttttctaagtccttttcttctttgtgctcgcttggcacgttctgaggtaacttccttgccattcttgtctaagatgaccatgttttcaacatcttgcttaaaggcagctctaaagttagctaaaaatttcttatgtagttcttttctttcagcttcttcctctggagttaagccttccttttctttcttatggtaaagttcgttgattcgatcagttacctttttttcttcttctttgctcattgcatctttattatccataataattccacctcacattaacactcattagtctaccctattttatgtcataaaaaaagtataacttcttaagaacgcctgtttgataatattgacattatctggtagaattaggttataatattaagtaccataaatacaaacggagaattaaaaatgccaagaaaaacaagcgataaaaagcaactagaaattttgcaatatatttacgatacagttgagaaacggagcattccacctacagttagagaaatctgttctgcagttggtctttcttctacttccactgtccatggtcatttagctcgccttgaaagaaagggctggctagtaaaagacgctacaaaacctcgtgctttggaaattacccgtgaaggtaaaaaagagttaggtatcaagccaaaggaaattccagttatcggtgtggttactgcaggacaaccaattctggcagttgaagatattgatgactactttccactcccaccagacttaaaaagtgatgctggtgaactctttatgctcaaagtccacggtgaaagtatgattaacgctggcattttaaacggtgatagcgtaatcgtacgcaaacaatcatctgccaacaatggtgaaatcgtggtggcaatgactgaagaaaatgaagctacagttaagcgtttctacaaagaaaaggatcactaccgattacagccagaaaatgatacaatggctccaatcattttacctaaagttacaattttgggtaaggtagttagcttgtatcgtaataacattgactaatttcaattttgacctagataatttatctaggtctttctttatgccaaaatttcagttattttttcttcaaataatggtaaccatttctttagataacccgcacgagttggatgaatttcatcagccatatacaaagcgtcttgatgctgaaaatcaggatgatcgtataaatctagaatctcaacgtgacacttttgagccagttcgtgtactcgttcaaccatctgtttgtataacggattagcaaaataaggattagtataaattaaaattggacatttccaccttgcttgagccgttgaaatcatatattccaaagctcccgtaatggttttggtgtcaaagttttgattagtaattttgcctagttttttattttgatttgcatcattagttgaaagttgtaagacaaaaacatcaggttgtgattcggtcagctcttctctaaaacgagcaacataagaatcgtttggcttataagtatcttcatcaactaaggtcgtaccattttctgcatctttaattgcagcaacgccatcacgcttccaaagataatcaacaaagctttcacccaaagcgccaaaaccaaaagtaacagaagaacccaaaaataaaattttcttacctatcaaaggactcgcaacggtttgtacactatttagactatacttacgactatttcctgctaaataagcaatatcagtgtaataacgttgatgtaaagcatgctcatctagatccatgcgtaattcatttaaagcgatatccgataaatcattattttgtctaattggaatcaaaaaagtttcattactcattttcagatttttccttttctacatacggcttgattttatcccaatctttaataatatcatctgttagcttgcgattataaaaaacagcggcaggatgatattctgggaaaatagtgtatctttcttttgaccaaatatagccgtctttagtttcatttaaacgtaaaattggtgtatttttaattacttgaccatgttcagctgaaatcttatgaccagaccccaaaagacgttctaatcccgtattacccaaggcaacaattagttttggttgagcatagtcaatttcaaaatctaagaaatgcgcatgagctagaatctcttttttggttggcttacgattgggatatttgattacttctttattttcacgcttgctaaaaacctttttgattgcaaaaggtcgacttctcacagcagatgtaatatatacctgatcacgtgtcagaccaatctgcttcaatgatttatccaattccttacccgcatccccgctaaagggaatattattaacaatttcatttcgaccaggagcttcaccgacaatcattaataaaggatgttggggacccgagccagaattaattccttctagctgcatgcctttagatcgttctttcacttcgtcaatcagttttttcggataatccatttttccatcttcttttaaatttttgttttactcgactttactggggacatttacaaatgtggataactattatttctaacgctaattccacatttaatattattttttacaaaaatagcttcacaataacaaatgcctttatatcaagattagtaatagatatctgccagctttgtgatttttgtcttagtttcacaaccgtttcacggttgaatttcttcacaatcttttttcatcattactactatacagccattttatcattgtgatctttttaaaataaaaggctatcaccttctattaagataatagtcctttatgatatcagtttaaaagtattacacacagactaattatgcaacagtgtctgcaatattaaattagttgaaccgtgacgataatctaatggtgatgcgccatagtctttttcattacccaaataaagatagtttttggtacctttaacatgtaaataaagttgaggtgatttttcaccttctattttggttctatcaaccgttagtttagcgccagcacgataaagcacctttttattttgcttaaatttggcagtatacgcatatgcatcatttattaaagaaacactcacaggtcctttatcccacaacgtcttaccatctactaaagcaacgtctgccgcattgatatattgtgttttactaatctgaaaataagtatgatcaccttgttgaattgcaggtaaagtcatcttagttttattttgataataataaaattgagtattagcagccgctttcttaggtttaccataatagtttaaaaccgtgccttgctttagatttttattcttgaattgcttgcctgttgcatcataaataggtgcattattatttaaaaacacggttcccttgccattcaaagtagttacttggctggcatcaatataaccgcccttaccaatattaaataattgcttaggcgaattatagtatggtacctcaatttttggtttttgtttattagtaaaataattcttgccaccattatagctaactaattttttaccatttttatcataaatataatttttcttgtgccgaaaatgtaacttgaccgtatttgtgttaccaagccaggttaacacatcgctttctttaacatagcctcctttaccaatcgaatagtaaagcttaccaccaataattcgactagttggcacaggaatcccagctgcaaagcgctgctgaataatataagtcttgccactatattttaaatgagtaccagctttgatattttgatgatatttcgaattataattacctgcacgatcataaattattggtgctttatttacctggattgtattcttagctgcttgggctttcttcgtcgttgcttgtaccgtagtcgtgatattgggaaaagataatataggtgctactgtcaatacggttgctgccacaagtgcaaatttgcaattgaacttcatttatttcacctcattcattccataactccatcatagcattttatatacaacttttgggtagaaaaaaagccagttccactggaactgaccttttttatgattgacgttatgattaacgacgtgcttcagcaattcttgctgacttgccgtgacgttcacgtaagtagtaaagcttagcacgacgtacacgaccatgacgcttaacttcaaccttagcaacacgtgggtcgttaactgggaaggttctttcaacaccaacacctgaagcaatcttacgaactgtgtaagtagcaccgatgccagtacccttcttcttgattacaacgccttcgaacaactgaatacgttcgtgagtaccttcaacaacacgtacatgaacagtaacagtgtcacctgcacggaatgcaggaatatcgtcacgaagttgttctttagttaattcttgaattaatggatccataatatacttttctccttcttcggcattcatcaacgtaccaacgccagcggaacacccctaaacttattcattgtggtcacgccacgatgaatagtatatcaagtagagcttgcttaatcaagctctgctttaatatctgccaacattttcttttcttcagttgttaaaactcgttctttgagcaaatcaggtcgatgcaaatatgttgttctaagagcctctttatgccgccattgtgcaattttttgatgattgccactagtcaatatctctggcaccttttgcccttcaaaatctgctggacgcgtatattgcggatattctaacaacccatgtgaaaagctttcttcaactggactagctgcattgcccaaaataccaggtaaaagtcttactgtagcatcaatcatactcattgttggcaattcaccaccagttaaaacataatcaccgattgaaacagtttcgtcagccaagtcataaacccgctgatcaaagccctcgtaatgtccgcaaataaaggttaattcatcttctttggcccagctttgcgctattttttcattaaaagttttaccttgtggtgcagtaataattaccttacctgtggatggtaacgagtcaagtgcttttttaatcggcataatttgcaaaaccatcccagcgccaccaccatagggcgtatcatcaacatgatgatggacatcggtagtgaaattacgaaaattaactaaattaagctcccattttttatcttcaagcccacgtcccaacattgaaacttgcaaaggagcaaacatatcaggaaaaagtgtcaatacattaatcttcatcgcgtaagccctccaataactcaacatagacttttttattagctacatctacttttttaaccaccgatgcaatattaggaatccaatactctttaccattatcttcatggactagccaaatatcattagcaccaggcgattcaatatcagtgattttacccaagcgcttaccggattcttcatcaatgacatcacagtcaaagatgtccttataataataaacgccttcaggtagttcaccgcggtcggcttcactaacaactagtatttttccttttaatttttcagcttgatcaatatcagtaatctctgcaaattgaactaaccaaaattgcttaaaaggtctactcttggccacagttaaaacttgagaagtttcacctttgattgccaaatgcatccctatagcaaaacgatcttcagggaaatcagtaattatactaactttaacttcaccattcaaaccgtgcgtagttaaaatccgagcaacatcgtaatattccattttttctcctttaggtataaaaaaagcttgaagcacacggcatcaagctcttaattaatagcaaaattacttattgtattttgcatcgtgcaacttagccatcaagccagcacctgaaagaagtgatctaacagtgtctgaaggttgtgcacctttttgtaaccattcaaagatcttgtcttcgtcaagcttcaattcctttggttgtgaaactgggttgtagtaaccaacttgttcgatgaagcgaccatcacgtggcatacgtgagtctgcaacaacgattctgtaaaatggctttctcttggcaccagcacggtgcatacgaattttaactgacataaattaatttcctcctaaaacttaacgattaataatataccaccaaacttaacaggtgtaaagtatttttccttaacagtttattttttaagaatggaatctttttaccttgcgtaaacgcttcttcttatttttcttgaaattcttgttcattcggcgcattgccatcttagccattggcgaatccattccaggcaaattgctcaagcccttcatatttcctttagacattttactcatcatgtcgcgcatttgcttaaactgcttaatcatcctattgacttcaactacaggacgacctgaaccagcagctattcttcggcgacggcttggattaagcatatcaggattttctcgttcctcaggagtcattgaataaacaattgcttcagtatgatcaatttgcttttgatcaacatttagattctttaattgcggattattagatagtcccggaatcatcttcatgatttggtcaagaggccccattttttgaacttgttgcaattgatcaacaaaatcattgaagtcaaaagtattttcccgcatcttttcagcgactttttcagcttccttagcatcataatcttgttgggctttttcaattaaggaaagcatgtcacccatacctaaaattctggatgccattctatctggatggaaaacatctaaatcgcttaatttttcaccttgaccagtaaataagatcggcttaccagttaccgcacgaattgaaagagctgcaccaccacgagtatcaccatctaacttagtcaaaatcacgcccgtaacatcaaggcgttcgtcaaagcctttggctacatctgttgccgcctgaccagtcatggcatcaacgactaaaagaatgttatcaggatgggttactttctttacccgctctaattcttccattaaaggttcatcgatttctaaacgaccagctgtatcgatcaaaacatagtcattcttgttcttttcagcctctgcaagtccatcttgaacaattttagctacgtctttttctccgtcttcactatatactggaacttttaactgatcaccaatttgtttcaattgatcaacagcagccggacgataaatatcgccagctatcaacagcggacgggccttttcggtcttttgcaaatgataggctaatttacccacagtcgtagtcttaccagttccctgcaaaccaaccatcataatgatagttggaatatgcttagacttgtttaaaggaactgcttcttcacccatcatcttcgttaactgttcattaacgatcttaattacttgttgacctgggtttaaactttcctgaacttccttgccaagggcttctttcttaatggttttaataaagtccttaacgaccttaaagttaacgtcggcttctaacaaagcaagtcgaatttcacgactagccttattaatatcttcttctgagaccttacctttgccagttaaattttttaatgctttttgaattctttcacttaaattttcaaaagccatgggctattctcccctcaattgatttaataaattggttatttcttttttagcagcttcactatcaccattatctaaagataaaagcgtatctgccaagacatcttcaacctgattgttgtcgcgcttcatatgcaatttctcttcatagttctgaagaattttacttgagcgcttgagattatcatagacagcctgacgagatacttgatgattagcagctatttcgcctagagacaaatcattgtagtaatagtcttcaaaataagattgttgcccctgggttaataaagagccatagtaggcatataaatcgcctagctcctcgtttttagttagttcatccattgattttcaccagtctttagtataacaaaggtcataagctagtgctagattaacctatcttagataacaatttctaaaaaaagtggaatttcaaatatgtaatagttgattttttaacgtacttttaattataattagatgaatatattttaacataaggaggaagttgcgttgtgaatctttggcagagaatgaacagtaaagaagatccacgcgtctatgaaaataaagatggacacctggtgcgctcattaaaagtaaaggacttcttagctctaggtgttggaacaatcgtctccgcttcaattttcactctacctggtgaagttgcagctaagcataccggccctgcagtagcgatttcctttattttagcagcaatcgctgctggtttagtggcttttgcctatgcagaaatggctgctgcaatgccatttgcaggatcagcttattcatggatcaacgtagttttaggagaattctggggttgggtagcaggatgggcccttctagcagaatatttcattgctttggctttcgtcggttcggggctttctgctaactttagagctctaatcgcaccattaggttggaaactacccgcgtcattatctaacgcctttggcaataacggtggtattattgatatcatttctttagtttcaatcttgttagttgccttattaattggtcatggtgtttcaagggcagctcgcgttgaaaatgccttagttgtattaaaggtgttagccattctactctttattgccgttggcgtttttgcaattaaaaaagttaacttcaccccatttataccgaaatacaagatgactgctaacggtccattcggtggctggcaaggaatctatgctggtgtttcaatgattttcttatcttacattggctttgattcaatcgccgctaactcagctgaggcaattaatccacaaaaaactatgcctcgcagcattttaggctcacttgctattgctgttactttatttgtcggagttagtttagttttaattggaattatgccttatcagaagtatgctaattccgctgaaccagtgggtttagccttacggtttgctggtcatccaattgttgccatcattgtccaaaccattgctgttttagggatgttcactgctttgattgggatgagtatggccggttcaagattgatctattcatttggccgtgacgagatgcttcctaaatggctgggcaagttgaatgcagatcgtcgacctaataatgctttatggacattaacaatcgtagcaattttacttggagcatttttccccttctccatgttgtcacaattggtttcagctggtactttaattgcttttatgtttgtttctttaggtatttataagttgcgtccacgtgaaggaaaagacattgatgatccttcattcaagatgccattttatccagttttacctgctttaggtttcatggctgctttaattgtcttcttagggcttgactaccaagctaaattttatgctggtatttggtttattttaggcttaatcatttactttagctatggtgttcgtcattcaattttaaataagcaaaataaataaaattaatctaaatacagttaaaaagatctgcattttgcagatcttttttcgtaccattattttttcaatacaattccttcatagagttttactgtaattaagtaataaagcaaatacaatactaaaaagatcgtaaatggaatccaaattttatcgtatggattagctaaaatccctttgaaaaattgtagtccaaataatacatcaatcacacccaagacagccggtaaagcgaacaaggtaccaatctccgctttaatcgagctctttaataacttacgtcttgatccgaccttccacaacatttcatatcgaggacgatcactgtttgctcctgatagcactttaaacattaaggttgaagctaacatagctaagaaagctaagcctaagaagaagcccataaattcaaaacctgacgcaacgcttgctactaagcgatattgagcagatttagaattattcagagaaacataaactccttgtgcatccttagtaactgtctggtcaagtgacatcttttgcaatttttcaatattattaaaattacttctaaagttattgattaatagcaaggttacttgtttgttttttccaggaatcttcacatattcagctggagttacaactttaacctcataatcagaataaggtgttaaactagcaagttggaaattcatctcttgttttttattctttacacctgcaactgtaatcgtctttgtcttccaattcatttggtcgccgttctttcgaccagattggaatttgatttttttcttagcaatttcttggtcagtaacatatagaacaggaaacttctttttcccattgaccttataattcaaagtcgtttgttttctaacggcaacttttttaagttgttgattaactttagcatcccttttatacaacacagcatcataatatgttgcctgaagagcagtctctgtcatattattaaagtttaatccaacagtgatcgcacctaatgctagagcaaaaagcaaggaaataacagttaaaactctattgtaatcacctaacctaaattttagctgacctaaggtaaaagaatgcagtttactgtatttaaactttttatttttccgtaaagcattgataactgtagtaaatacagaatcaaatacaaaatatgaaccagccaaaatagtgacaaaaccaatttcaaccgatttaatttgcaactgatggtaatcccacattgcccagtagccaatggctagaagggcaaggcctagaattacttcagttgctttccagattcggttattacgtaacttaactggtttttgatcctcatgcaaaagcttgattacactagtacttaccaatttgtgccgattccaaattgcagccaagaaaaataaaactacaaagaaaacaactgtccataaaatagccggtaaataaaagcctaagaatttatgcagctgcaaacccagttgagagattaataactgagaaacaacttgagtcaagccgataccaattaaaattcctaatgcagtagcgagtaaaccaataacaaccgtctctgtaaaaattaaacggccaattttactatttctcgctcctaggatcatataagtaccataatcttttttacgcatactaagcaaaaaactatttgcgtaaacaatatagactagggtaataatagctaatagcgctatcccaaaaataaagaccatctgggtaattgaaaaggcaatggccattgaacccttaagaaaagctggattaattgcaatggtcataaacatataaaagattgcagcagctagagttagccccgaaaacaaaacagcataatctttaaagcgactttttagccctgttagtgataatttccaaagcacgtctatacctccctctaacgtctacctaattcagcaataatatcttgataaaattcttctctggtcttattttcttttttaatttctttgccgatttttccatctttgatgaacaaaattctttgagcgtaagaagctgaataaggatcatgcgttaccatcagaatcgaaacttgatcattcttattcaagtctgccattgttttcaataattccgtagctgattgtgaatctaaagctcctgtaggttcatcaccatataaaattgccggattatggaccaatgctcgagctgaagcaacacgctgtttttgaccaccagaaatttcagctgggtatttgtccaagatagattctattcccaatcttttggcaatcgccattgcttttccgtcaatatcctttgccttcactccttgaagcgataatggcaaggctatattctcgcgattagtcaaattatctagcaagttgaaatcttgaaaaataaagccaatttcttttccgcgaaaatctgccatttgattgttcttaagtgcagtaatgtcttgcttattgactaaaacatgtccactagttggcttatctaacgtcgacaagatattcaataaagttgtctttcctgaaccagaagcacccataatgccaacgaattcaccttgttcaatggcaaagctaattccttttaaagcttggtattgcttctcaccttttttaccataagtcttagttacttgatccactcttaaaatttctgacatttttatcctttcactaataatattactgttctatttacttaatacagtaatattatattaaagatttgtcaataatttttgcataaaaaaactccaaaagtaattaacttctggagttctactattttacattacttattgtcttcactcgacttaagcatctttttcagtacattaaccaagccaagagtttcatctttactgagcatccctgtaatagtttggtcagtttctgcacggtgcttttcaaatttcttgcacaaatctttggcagccaatttttttgtcaaagatttgaccttgtcattagttacatgcaattctttagccaacttttcaaaagttttgccatgctgatgatgatttaattcaataagcatttccaattcattagcattaataccaaattttttaaatcgttattcatttgtttttcaacttcattgttaatcttagtaaaaaatgagccaatagtaccttctgccattgtctatattcctttcatttcacatattataaaaaacagccctttttcgagctgttttgaatttattaaagattttcatccatattgaaagtaagtttggacatgttgatcgattcaatcatcatttgaccccaaagcttttcagtttccttacgagtatgggcaacagtcttttgattttccttagtcaaatattcagttaattcatcacctgatttaccttctgcaccagcaataatttcttcaactcgacctctgaagtagcggttaagttcagttaaataagtagtatcaagctgaacaaattgtgggtaatgactttcaacgatagctgcaaatgacttgtaataccaccatgcatcattcatattgtaatccattgaggtattgttatatgaaggatcagtatcattcatattagcaaagaatggtacaaatggagtgaaagttggaccaccgatacataaccacataatagccgcacgatctgctggaacatcacttctaatttgcaaaatatgagcattttgcgtacggttcaaaccgattggacggtagcgatgtttttcttcatccgtacccttaccaaatggatcatacggggtatcttggtagtgtgaacctaaagcaaattgaatatcttccttagtgatcttcttagctgccttacgaataaatggaatatcgccatcttgtgggttttgttcaatttcgggattgaacaatttttgaatataccattgacggttggtgttgtagtgacgatcttgttcagtataggtaccaaaaatatgacggaagttccagccttcatgatctgggttcaaatggtgttcttcaacaaattcttgaatacctttactccacatgaagtaatcaggattatcaaagtcaacttgttcaatcgcaactcgattaccagttgcagcgtaacaatcatctggaatgcgctcggctacccagtggtgacctgtaacaatttccatgtaccaaatttcatctttatcactgaataaaactgagttaccagctggtgaaccgtacttagcaattaacttacctaaatattgtacaccatcacgagctgaatgaatgtatggcaaaacagaagtctgcatgcagtcttcatctaatccatctttaacaagtggatcaaatgctaaagttctctcattaccataagttgattcagtacatgacattgcaacgttttcttggttaattccactttcatcgtagtagccacgatgcttgtagtcaacattaggaacagctggtacacgttgcgcatcttctggcaagtccatttcaaacttgtttaaccatgacttaatatgtttcttttcaccatgacgggctggctcaataatgaacttttgtggggtaattggacgaaaagtgtcatcattacgagcaatcatagtggtgccatcaatcgaggcatttttaccaactaagatagtagtacaagcactatattctttcataaaattctccttataaaacaatatttacatctctaactttatcactagaccaagccgtggaaaagaccgatcgcataatttgcagcatcaaaatcagctaagtcttcagctctttcgcctaagccaaccaatttaaccggcaaattcatttcgttacggatagctagaactacaccacccttagatgagccgtccaacttagttaaaacaagcccagttaattcggtggtcttgtcaaagtctttggcttgcaaaagcgcattttgcccggttgaaccatctaacacaagcaaggtttctgttggctgatctggtaaaagcttcttgattgttctttgaattttttccaattcagccattaaattcttcttattttgtaagcgtcccgcagtatcgactaaaagatagtcagctttttccctgattgcccgttcagttgcatcataaacaacagaagcaggatcagccttttctttaccagtaactacgggtacgtcaacacgttttccccattcaactagctgttcaacggcacccgctctaaaggtatcggccgcagctaaaattactgactttccttcatccttaaaacgtttggctaacttaccgattgtagtagttttacctgcaccattaacaccaacaagtaggtaaacgttaggtttagcttcagcattatacgtcaattgctcatcttcgctattgccacctttatcgtaaaggtcaaccaacttttcaacgattactcgcttcaagtcatcacgtgacttagcattttgcaatttagcctcttcacgcaattcattagttaattgttcagcagtttcatagccaacgtcagattcaattaataagtcttctagatcatcgaagaaatcttcatcaactgttctaaacttggcaaaaaaggcgttaagtcttgcaccaaatcccttgttagtcttttctagccccttttcataaagctgttcttgtgattctgttggctcctcatcagaaacttcagtttcttcaacttgttcttctgtttcagtctcagtagtctcttctactttaacttcttcaggctgttgtttagaatctaaatctactgctttttcttcatcaccagattcagcttctacctcagagtcttcttgtgcttctactgtttgttcttcttcatcagtagtttcagttttcgatttagcttcatcaactactttttcagattcttgatcattatcttctgattcagtcttagcttcattttcttgctcagtctgtttttcttcttttttgttttcatcctcttcgtcttttttaccaaagagtgatttttttattcgatcaaataaacccaactatttcacctcatttttattcttcatttcttttaatgaaaccgacaatacttgcgaaacgccagattcttgcataaccacaccatatagttggtcagcctgccgcatcgtccctcgtctatgcgtgatcacgatgaattgggttttcatatcgtatttaagcaaaaattgcgcaaaacgagtaacgtttgcatcatccagggcagcttctacttcatcaagtacacaaaatggtaccggattaacctgcaacatggcaaacaacaaagtaattgcggttaacgcgcgttcaccaccagaaagcagacttaaacgttgctgctttttgccaggcggctgtgcgataatctcaattccagtttctagcaaattattaggctcagtgagttccaatctagctttaccgccaccaaagacaactggaaaaatactcttaaagctagatgctacttgattaaaggtactcttgaagcgcgtcttaacttcttcatctaactcgttcattgacttttcaaggtcatcacgagcttttaacaggtcattttgctgaccattcaaaaagtcatagcgctttttcacatcttcatattcttgaatagaatcaagatttacttggccaatatcttcaattgacatgtgatgcaacttcacgcttttagccagttcattgcgcttttcttcagtattttcgccttctgcttgctctaaagcagcttcaaacgttaaggcatactcttcactcaaagttgacaagcgctgatcaattgcggaattaaacttcgcaatctttactgagtaatcttcttgttcaattgctgcatctttgcgtaaatcataattacgactggcaacttggtcaagttgattaatctgcgcatcaacttgtcctaattgcgcactaagttcattcagcttcttttgcagagtttcattcttttgcttaatttcagctttttgtgtttgtaaatcagaattctttttaactgataattcaccattttgacttaattcagttaatttctgctctaagctatcagtttgcttctgattattagtgatctgaatatttttttctttttcctgactagctaagttttccaacttattagtataaactgcaatttgaggatcaagctttgataattcctcttgtacacgttgacttaagctattgaagttcttaatcttttcttgcaagtcattcattttgcccttttgtacttcattttgcttagccaattgttcctgctgatcattagcctgagtgatttctttctttaaagcagcaatccgatcttgttgttcttttactcgagatttatataaactattagcatcagttagccgctttacttccttttcttgattttggaaagaaatagcagcttcattaatcgcttgattagtctcctgcaaagtatcacgcagttgttgcaatttagccgcaactttttcaccttgagtaactagctcatctaaccgttcttgatcttcagccaaattttgtcgtaaagtctgtaattgcttctctaactgattaatttcagttgccgtctgcagtggtgaattattacgttggtttctttgaccaccagtcatcgaaccacctggggaaatcacatcgccatctaaggtaacaatccgatagcggttaactcgacgtgaaattgacattgcactatcaatcgtatcaacgataatcacactacccagcaaataattaatcgcagcagtaatatcttgatcggctttactttcaactaaatcacttgctacgcccttaaagccactaaaagattgcaaagtagtgatagttgactgtggaatagtatattgacgcaagccatctaatggtaaaaaagtagctcgtccactacgactacgctttaattgattaattgcatccctagcactaactctgctttcagtaatcaaatcctgtacgccaccgccaagagctgtcgtcattgcagcttctagctcaactggaaatgtaatcaattcacccacagccccgatcacaccagggaaatcagatagatgattcaaaacattacgtacaccgtagtaataaccctcatgccgcttttgaatatttactaaagcttcatgtcgcgcttcaactttctctaatttactgcgctctgcgttaacggcttgccgaatctgattaatctgtttagttaaatcattattttgatcattaacttgcgcaaatttttctttttccttttgccgcttaactgtcagctgcttgccttcagttctcagcttttccagttcagtccgagcatcggttagctgcttgcttacatcactattttgataagtagtgtctgcctgactacgttttaattcagtattcagattaacaatctgattattagttgtagcctgatcttgtaaaagttgaatatagtcgttacgacaatcttctagtcgcttactcaattcttctggatcatcgtgcaatttaccagtcaattgatcatgctgctcttgtaaagcatcttgctcctgcttaagttgctttttattccgctgcagttcagacaattcatcctttagcttaaccaagctatttttcaattcttcaacttgacgttgagtttctaccctagttgaattattaaactgttgtgattgctgtgcgacctgcaagttagtattgatctgtgataattggtcacttagctttaataattcactctgcgtttgctctcgctcattttgaattttttgatattctgcccgtttttcagaaacagcactttgcgaaccttttacttcattatccagttttgttaacaggatttggttcctatctgctgctttttggacttcttctttttgccggtttaaatcctcaatttcaaaagctaatagactttttaatttctgatctagtcccttcttttgaaattgatattctttagccagcgaactttgctcatgcagcggctccaatcgaccttcaagttctttaaccaagtcattgattctaattaaattatccttggttttctccatttgcgccttggcagcttctttttgttgtttaaaatgcaaaacaccagcagcttcttcaaagattactcttctttgttcaggacgagaatttaagatctgatcaactcgaccctgagaaataattgctaggctattaggtgaaattccagaatcaagaaagagtgtccgcacatctcgcatccgcacttgctgattattaattaaaaattcactgtcacctgatcgcagaaatcttctagtaattgagacctgatctgaatcaaaagccaactcacgctctttattatcaaaaactaaagtaacttccgccttattgagcggcttgcgaaattgactaccggcaaagatgacatccttcatattcgttccacgtagtgacttagcactggattcacccattacccaacgtacggcttcagtaatgttacttttccccgaaccattaggaccaacgattccagtaattccatcatcaaaatgaatagttgtcttatcagcgaatgatttaaaaccatcgagcactaattctgttaatggcactttttcatccccttatttttctaatttttgtaaagcgaccttagcagcttgttgttcagctgctttcttattgtgaccctcaccttttgattcaacttttccgttaatttttagttcaacaacaaagtgtgaaggtaattgagattcactaataacggtgtattcgatattcacaggaccatcttgctgcaatacttcctgcaagtctgtcttatagtcgcgtgaatcatcgaattcacccttatcaatcaatggataaactgttaaatgcaaaaaatgttcaactgctggcatcccttgatcaaggaaaagtgccccattgaaagcttcaaacacgtcttccagtaaagttttgcggtgtcgtgctccagctttttcttcaccattgcccaagtgaatctcatcttgaaaaccacattcaatggcgaattctgaaaatccttcagttcggacaatattagatctcaaacgagttaattcaccttcattcaacttaggataatgaagataaacataattcgaaacggctaattctagcacagcatcaccaagaaattcgagtttttcataatcgcgaattccatcattgggatgttcatttgaatatgaagaatgcgtaaatgcttcttctaatagcttttcattgttaaattcgatattataatcgtcttttaatttttttaaaaactttgtacttaccataaaaatgcccctttttatacctataaattataccagttttcgggtcacagaaaaaagactgcttctaaaatttagaaacagtcttttgtaattttaaataattgctttacttagcgtaagcaacattgtaccagttagggaaaccattacccattgaatccgatggcttaagtgagtaaccagtaagcttcttgttaacggcagtaattgagtaactattagctataggaattacgtaagcttcatcaaacatgtacttttgccattcttggaatttttcaactctgtacttgtggttgaaggccttctgtgaatccatttcgtcaagtaacttggtgttttcaggagttacgaaacgtgagtagttcattggagccttttcgctatacaagtcattaggtgatggttcacttgataatgaccatgcaccaataaacatatctactgatggatcatcgttttgaaccttgtcgtagaatgaattgaattcgattaaacgaccactagttaacttaacgttcaagcccatcttcttccattgttggatgtagttttgaacgattggttctgctgttgaactaccagtcatagcagctaaacgaatagttaaaggcttgccattaggttgtacacggtaagtacccttcttcttgtagccagccttgtccaagatttcgttacccttcttgatattgtaagtgtaacccttgatgttcttgtcgaagtaatcaccgaattgcttaggaattaaagttggaattctgaatgataaaccgaatgagtagcgcttgtaaacttggttaacattcataccataaccaatagcttgacgtaaggccttgttattcatcttagaattcttgtccattacgttttcgcccttcttggcatcccacttaccaaccttaaagcctaagtatgagtattgtagtggaattttagcgataaagttaacgcccttagtatccttgatgttcttccattgtgagttgattacttgagtaacgtcaaattttctggacttaatactttgagcaactgagttagggttaattactgtagcagtaatctttgaaagctttggcttacccttgtagtagtattcgttaggaacccaagttactgattgaccacgaacaaccttttgcaacttgtaagcaccaaagaacaatggcttcttacggatcttatcacttgacattaagtccttgaatttaacatctttcaagtagtggtaaggagcagcagcttcccaaatgtaaccattacctgaagtgttcataccaggtttcatcgtcttaaagtgaagaactgctttacggccgttttcaccatctggcatttcaaagcctgagatagtctttgacttaccttcatggtattcttgtaagccttccaaatcagctaaacttgaagtgtaacgttgtgacttagtgtctttgttagcaataatttcataagcgtattcatagtccttggcagtaacttgcttaccatctgaccacttaacacccttcttaatttcaacagttacggtcttagctttttggtcaaccttaattgttgcagcacctttatcattgaaaacatagtgatcatcagtaccaaaaagtgattctgcaccatattgcataacttcagtatcagtagctgaagttgaaagttcgtcgttgaagataccagtaaatggggtatcagcttcaacagcaaccttaacagtaccgccattcttagtagccttagtaggaacagcttccttaaacttagaagcagtctttgattcatcagaatgagattctgacttaccacaggcagctaaggtaagagctacacctgataacagtgtaataccagcaaaaagttttgcctttttcattagtaaaattcctccattacttggagcaagttgatcctttaattttatcactattacaaaaacataacaatagcatgaaaaagacaggtatttggattaagatacctgtcttttctattagttagttattagaatttaatataaggaatttgtttatgtttagaattttggagtttagttttactaatgattaatgaattacttagcgtaaccaacattgtaccaaactgagttagcatctgaaggcttaagtgagtagccagtaagcttactattcacagcgtcaatttggtatgcattaactgttggcacaacatatgcttcatcaaacatatacttctgccattcgtggaatttttgtactctgtatttattattaaatgccttttgtgagtcaatgtccttaagaagctgagtattcttcttagttacgaaacgagtgtagttaaatggtgccttttcattgtaaagatcgttaggagaaggttcgctagatagtgaccaaccagccatgaatacatcaacgtctttagagtcatgttgaactttatcacagaatgaattgaattcaattagacgaccagttgttaacttaacattcaagccgatcttcttccattgttgaatgtagttctgagtaattggttcagcagtagaactaccagacatagctgcaaggtgaatggtcaaaggcttaccatttggttgaacacgatacttacctttcttcttgtagccagcgtcatcaagtaacttattagcctttttaaggttataattgtatcccttaatatttttgtcaaagtaatttccaaattgttcaggaattaaagtaggtactctgaatgttaagccttgagtataacgcttttccacagcatcaatgttcattgcataggccattgcttgacgaagtgacttattgttcatctttgcctttgggttcatgacattcttaccattttcccacttaccaaccttgaagcccatgtagctgtattgaagtggtactttagcaacaaagttaacacctttagtgttcttaacctgttgccattgtgaattaacaactctagcaatatcaaatttgtgactcttaatagcttgagaagcagagttagggttaactacagataccgtaattttatctaattttggagtacctctccagtagtatttattaggaacccaagttactgattgaccacgaacaattttactaatcttgtatggcccaaagaacaaaggattcttacgaacagcatctgatgattcaagcttattaaatggaatactctttaattgatgatatggacttgcggtttcgaggaagtatccgttacctgattgaagcatcccaggtttcatttccttaaagtgaatgacaactttacgtccattttcgccatctggcatatcaatacctgaaatagtttttgatttaccatcatgatattctgtcatgccaacaatattttgaagtgaggctgtataacgttctgacttgcttcccttattagccatgatttcgtattcatactcaacgtctttagcagtgacttgcttaccatctgaccactttacgccctttttaacttcaatgctaatggtcttggctttacgatccaatttgaatgtcgcaggacctttgctattaatcctataactatcatcagtatcaaataatgcttcgttaccaaattgagctacatcactgtctgtctgactggttgataactcattattaaagacacctgtgaatggtgtgtctgcttcaatggcataagataaagtgccaccttttttaacttcctttactggagttgtttgcttaaatttcttagcatcagttgcacctgcattattactattaccgcttttaccacaagcaactaacgctaatgctgccgcagaaacgactcctactgaacccaatacttttgataatttcatactttgtttcccccatctaggatacaattcattttcaatagttatttgaatcaagttgatgattaaataatgccaccataaattagaaattcaatagttttatgagattatttttaatttatattttatttgctttcaataagaatttagttataaatatgcaaaaacagctaccttgcgatagagctgttttaatttaattattactttattagttttcacgctgtcttgcgtcaccggcacgttgcagagcttgaccaacatagttaatacttaaggaaattaccaaaagtaagatggtagcaggcaaccacaaccatggacggttaataacgttaactgggtcactggcaaaaccaatcaaagtaccaagtgatggtgtagtacttggtaaaccatagttcaagaatgacaaactagtttcgataccaatgttaccagcaatacttaatacgacatcaataataatcattgaagtaatgtttggcaaaacttcacggaacataatcttaaagttagatgaacctgaagtcttagatgccaaaacatagtcacgaccacgctgcgataggacgaacgaacggaagtaacgtgccgtgaccgtccaaccaaacatcgcaatcaagaataccaaagttacggcattgtagttaggaataacagtagtcaaaacaataataattggcatttgtggcaaaatctggataaagtcaactattctcatgataactgagtcaattgctccaccaaagtaacctgaaaccaaaccaactaccaaaccaacaatttcagtaattgcagtaactgaaataccaatcatgattgagttacgtccacccatgatgagcagcttcagaatgtcacgaccaccatcatcagtacctaacaggtggcctgcttcaccccaaccataatatgaatcagcaatgttcatttcagttacttgagcacggtttaagaataatgaaccaccaaaagtgaacagtaaaattacaataatgataatcaaagctgttaaagcagactttgaacgcacaatttcgtgcatagccaccttgaatccagaaggtgggagagtagccttttgctttgcgtcttctttagtagctttctttgtagctttttctttcttatcagccattttttctctcctccctattgaattctaatacgtgggtcaatgatactcataatgatatctgacaataagttaccaattagagtcaagataccaaagatcaaaatcaaagcagtcaaagtagtgtagtcacgttgaccaattgaatcaaggaacaacttacccataccagggtaactaaatacactttcaatgatcattgaaccactaagcaaaccggtaatagtgttaccaaggaaggcagcgattggcaataatgagttacgtaaaatgtgcttgttgaagacgacattttcaggcacacccttactacgagcggttcttacgtagtcttcaaccttgttatcaacaatcccagttcttaagtactgaacagtaccagtagtagtaatcaaggcatacagaattgctggcaaaatcatgtgatagattctactgccaagtacgccccagaaaccagaggcactagctgaaacagaaccagaaattgggaaccaacccaaggtgaaaccgaagagccacaaacctaagatgtagaatacgaatcctggggtagccaaggtgatgtagttaaaaattctaacactagtatcttgccattcgtcttggtgacgacctgaagtaataccaagagggatagcaatactataagtcaaaatagtagttaaaagtgataaccagaaggtgttatttgcacgatcggcaatcaatgaagttacaggaacgtgctggatgtaacttgtaccaagatcaccatggaacaagttgcccacccatctaaagtattgcacgtaccatggatcaaacagacctgcagctcgtttcagagcttcaatttgcttagggtcggtgttagggttaattgatccactgaatgggtcaccaggcatcattttagccaaaaggaagaccagcaaactcaagataatcaattgagggatcatgattaacaaacgccgtaaaatcgttttccacatgcttaatcactctccttttcttctaattcttcaagtttagcttcgtgggccatatcttttggcaaagctacccagtgcttaggtgctacttgttgtaatggatatacacgaccatccttgtcgtaccatttactttgattttcttcaaattctttttcaacttgttcgcgatgtttcttgtgttcttcacgatgttcaacatcaacttgaggaatagcggaaagcaaacgcttagtatagatgtgaattgggtgcttgtagatttcttcacggctacctaattcaaccaaacgaccacggtgcatgattgccaagttttctgacatgtgcttaacaacacccaagtcgtgtgaaatgaacaagtaagcaatgttgtattgttgttgaatgtgcttcatgaagttcaaaacctgtgcttgaactgacaagtccaaagcagacgttggttcatccgcaacaattaacttagggttagtagcaacggcacgagcaacaccgattctctgacgctgaccacctgagaattcatgtgggtacttgtagatcgcatcactaggcatccctacaatatccaacaattcttgaacacgatcacgttcttgatcagtagtcagattttcaaagtttctaattggctctgcaatgatatcttcaattctctttcttgggttcaaacttgacattgaatcctggaagatcatttgaacatctttattataatcaagcttcttacggttgcttgccttagttacgtccaaacccttatacatgatttgaccacttgtaactttttcaaccccaacaatcgccttaccggtagtagatttaccagaaccagattcaccgattaaaccgtaagtttcaccttcaccaattgaaaaattaatcccatcaacggcacgtacataatcagtaattctgttccaaaatccagagcgaattgggtaatagacctttaaatctttgatttgaataatttcttttgccataaactactccccacttgctgtcttttcatcctcaaagtggaatgacttccagcaagtacatcttacccagtgacctggcgcaacttcatgcaccttaggttcttcttcatgtgcgctagcaggaatccaaggaattcttgcagcaaatctatcaccagtacgtggcatattcttcaaagatggcacagtaccgtgaattacatgaagatcttcatccgtatcgtctgattgaggcattgagttaagtaatgatcgagtatatggatgaagtgggttttcaaaaattgtctttacatcagatttttcaacaatttgaccagcatacatgactgcaacttcatcagcagtttctgctacaacacctaagtcgtgagtgatcaaaataatccctgagtgagattgtttttgaatatcttcaagcaaatccaaaatttgagcttgaatagtaacatccaaagctgttgttggttcatcggcaataataacttcaggcttacatgcaatcgccatcgcaattacaacacgctgacgaagcccaccagacaactcatgtgggtacatttcgtacatttcttcaggctttggcattcctacttgattaaacaattcaatgacacgtgcgtgacgtgccttttcgtccatatcagtgtggtaataaagagtttcagcaacttggtcaccaacacgcatcaatgggttcaagctggctaacgggtcctggaagatcattccgatcttgtccccacgaatcttattgaaaagtgattcattcaagccaactaggtttaattcattgtaaagaatgtcccctgttactttagtatttttatggtcgtacaatccaatgatacttgaggcaattgtactcttaccacaaccagattcaccaacgatggctaaaatctcgtcgcgcttcagagtcagattaacatcgtctgccgcatcatagaatttcccttgcaaacggtatgccgtatgcaggtgttgaatatctaataaaagatcactctgcttctccaaaggtcattcctccatctcgagcttttttattaaaagcatttaatcttttctatttattttctaattataaacacaaagccggtcgtatgcaaatcacgacacggcttttgtaagtgtcaatgtttttgcggtagcctttaaaccattagtctaaccttaatttcttaaatatttatatgacttaaatttctgcttagcttgcttaaataactattgccagctacctgtgcggttaatgcgccatgctggatgcctaaatgaacttcatgacgcttctttaagctgtcacgggccgctgcttttaattcctgttcagtcaatacagttatttctgaatcttcaaactcgctgctaagccaaaattccagctctcgattcttgatgcagcttaagatcctaagcatgccttctgctccagattttgaccatttcttgccttgccccttaacacggtaggtatacttgcggtggttgctctcgcagcagccaatggctttagtcacagtcagttttcgtttcttaaacggcttaatatcgtcccaatgacgatcaatataattccttaggcgccccagataatcatgattgagctcggtattcaattcatcaattagtcggctttctgcagtggttaggatagttttaactttgtcatagctgtatttgtattccaaagcagaaatcagcttgccttgcaggtcaggcgcaaaatatagcctttctttgattttcttatttaggtgaaagacatccaagaaatgctcatgacgcttgcatagccctacaatgtcatcgaagtctgttttggcatatccagcaccgccatcggcgttgctaagaattacagtatcagaaagatcataagtattggccaggtactccttggcttcgttcagcgcatcaagtcggcttaaagaaacaaattccttggcattgattcgctttctgcgtttcttgcttatattgacaatgccttcacagacctgatagcgatgaaattccaaccggcttttagtgcctttgatcaccacgccatcgccttcaagatacaaaactgggacctttttcttagtgcctgcggcatcatatcttgaatctgcttcttggcccgctttaatatttttcccggccatttttaccaaattgcccacctgcatatggctaatattaaagccagacaggcaattgactgctagagcagtattgcgataagtggcaacgctgcttacttctaagatgtttttgactgctaaaatactgtagcgcttgtatttgtcaaagcccattaattcatccaagggataccttgcttgtttgcctgggcagacatatcttcttctgacatacctaacttcgccaaaagccatattgattgagcgctcattcttcttatcaatctgatagccctgtgctttaaccttggtaatcatttcatcatcaactttagctaaagccaaggccatgatttccttaatcaggtttaagaagaaacagattatttttctttcacgcttaatataattatcttcagactttataatatttgcgatttcagttacaattgaattcataaaagaccagcttctaatgtgttttttgttcttaacatcagactactggtctttttgtttgagctcaagtccaaattcaaaggacttgggcttttttaattatttattcaacttaccgtaaaaaattatacacttagacggctttttttagaaaattatccttgatgagacttaatatatgaaacagcatcaccaattgttttaattttttcagcttcatcatcaggaatttctgcgccaaattcatcttctagctgcaagataaattcaaccaaatcaattgaatcagcatccaaatcgttcataaaattagtgtcttcagtgatcttatccttatcaacatcaaaattatcagcgatcatgtctttaattttattaaaaatttcttcttctgacataaaacttctcctttttaataaaacattgtactatttttcagcgaattcgtctctaaaatctgcaacaagtttttctttaaccattttatctacttgcttaagagtgaaataaattggacgttcatttgatctaccgtgggttttaactaccggtgcattaacgcctagtaaaactgcaccgccatatttagccgtatcaaatttagattttaagcttgttaacgagcccttcaccattaaggcacctaacttggtcattacaccgccatttaataaactatcttttaataaatgaagcaagacgctagaggttccttcaatgttcttaagtacagcgtttccggtaaagccatcggttactaccacatctgccttgcctaatagcaattcattaccttcaatattacctaagaaattcaaattactttctttaagcaattcataggccttttggtgaacatcatcacccttgtcgctttcagctccattatttaagagcattactcgcggatttttaatgccgcgaatcttctcagcatagtacgaagccatttcggcccattgtaaaagatattctggcttactcttagcattagcaccaacatcaaccatattgaagccatcgtcactattttgaacaggtaaagtaggcatcaaacctggacgaacaatccccttgattcgaccaataataaaaattccacaagcaagcaatgcaccagtattgcctaaggaaagcaacgcatcagcttttccttccttaacgaagttagctgccacaaccattgaagagtctttcttttttctgattgccttaactggttcatcttcatcagcaataacttcagttgtaggtacaactcctaattgatcattaatttgatcttcagggattagttttcttaatgcttctttatcaccaaataataaaaatttagtctcaggcattccagttttagcttgtaaaaccgccttaacgattgcatctggggcattttcgccacccatcgcatcaattgcaattgttctcatatattcaccacaatcttttctaaattctgttttgctctaattgcttatattctagcacttgcttaagtgccttatgtcctggatctaataaatcaggatcagccgcaaccaaagctcgtgcttctttttgcgcaacgaccaatgtattgtagttatttactacatcacccacacgaaattctggcaatcctgactgagccttaccaaacaaatcaccttcaccgcgcatctttaaatcttcttcagctaatttgaagccgtcattggtcgacgcaataattttcattcttgctttacctgaatcggtcttaggatcagctagaaagacacaataactttgtgtttgtcctcgaccaattcgaccacgcagttggtgcaattgacttaagccaaaacgatcagcattataaatcaccatcatattggcattagccacatcaactccaacttcaatcacactggtagttactaaaatatcgatctcaccagctgcaaatgcagtcataatctcatctttttgcgcacctggcatttgaccatgaagcaggactaccttgtgattaggaaaatcatggcttaatttttcatgcaattcttctgcattttttaagtctaacgtctctgactcggtaatcaatggtgtcacagcgtaaatctgaaagccttgatttagctgctcttgcatttgtcgatagacttccttcatttgactacttgttttccatgtggaaataattgactttcttccggctggtaaatgatgtatttcagagactgtcatatcaccataaactgtcaaagccagcgtccgcgggattggcgtagcggtcattgccaaaatatctggttgatcgcctttattaatcaaagcttgcctttgacctacaccaaagcggtgctgctcatcaataatgactagacctaattttttaaagatgacactatcttgaattaaagcatgagtgccaattaccacattaatcgtgccatcagttaattcacggtagatctcacgccgctccagtgtttttgtattgcctgttaaaagagctactcgcacacctaaaggacgcaacaattcatcgatttttttgaaatgctgagttgccagaatttctgttggcaccatcaaagccgcctgatagccagctgtaatggctgcaaaaatcgcataaacggctacaacagtttttccagaaccaacatcaccctgcaaaagtcgccgcatttgactatcagaatgcatatcagcaaagatttcattaaccacatgcttttgatcatctgataattcaaatggcagagatttagttaattgagcaatttctgtcagatcgtatttctttgcataacccatttgtttaccatcattacgggtcaataaagctaattgtaattcaaaaataaaaaactcacgaaaaatcgcacttctcttagctagttcagcctcatgactattcttagggtggtgcattttttcaataattacttggtcttttaaaagacgatattcttgccgcaacttttccggaacaatatcctgcacttgatcaataaaatcgtcaatagccacattaattagatctactaattttttttgcttaacatgtcgattaaccggataaatcggcgccataccactatcattttctttggctgctacgaatttaaaggccgttaaactttgccgggcaacattgtatttaccataaatagctacttcttgtccgatatcaattttattttttaaccacggctgattaaaaaaattgaccatgatcacatcatggtcaattctcatcttgaaacttaagcgcgttttcttatagccaaaacgactaacaaacgcttcagtggctactattccctttagcattactttttgaccatccatgatttgatctaacggtaatgtttgtaattcgtcataacgaaaaggaaagtaaaaaagcaaatcataaatactatagatgcctaagcttcctaatgcagctgtagtctttgtccctacaccctttaagtctgtgacaggagcaaataatgcattatcaatcattgttattcaactgatactaagaagtgatatacaggttgaccaccatcatgaatttcaaattcaagatcatcatgtttggcttcaagttgttcaactacttcttgtgcttgctcttcactagcatcacggccaaacataattgtgataatttctgaatcttcatccagcatcttttcaatcatatcaacagtagtcttaattaaatcagcattgtcaaccttaatcttgccatcaacaattcccaagtagtcattcttatgaatttctacttcatcgatttcagtatcacgggtagcttgagtaacttcacctgaaacaaccgtatctaagtcctctgtcatagcttccacattttcatcaacagatgcatctggattgaatgaaagcattgcggttaaaccctgagaaatagtcttagttggtacaataccaaccggaatatcactaacttcagcagcctgcttagcagccataacaatattaccgttgtttggcaagacaatagctttcttcgcaccagacttcttgattgcatcaataaagtcttgagttgatgggttcatcgtttgcccacccgagataatacggtttaccccttcactttcaaacaacttacgaataccgttacctgaagcaactgcgatcactgcaaaatcaactgcttcttgttgttcttcatcttggtcaacgatgctttcgtgttggattctcatgttatcaatcttgatcttgcctaattgaccaaactgactaccgtattggaaaacatcaccagggtgttcagtatgaacgtgaaccttagcaatttcaccatcagaaacagctaataatgaatcgcccaagccagacaagtgctttctaaattcttccaaatcaaacttctttttatttggcacatcggcatcaagatcaaccatgatttcagtacagtaaccatttttaatatcttgagtagccaattggctttgaactgaagattggtggtgcattgcattgatcatttcatccatttcattttcgtcaggttgatattgatctgcaaagttttcacccattaagccttccaaaaagccttcatagataaacaaaaggccttgaccacctgagtcaactacaccaacttgcttcaaaacaggcaataaatctggagttgacttaagagccttcttagcaccttcaactacagctttcattacttcagttacatcgtcggtgttattggccttagtagcaccggcttgtgcagcaacacgagctacagtaagaatagtaccttcaactggcttcattacagccttataagcagtagcaacaccatttgaaaaagcatttgctaattcctgtgcagttaaggtcttcatcccttgggtagccttgtaaaagccacggaataattgtgaagtgataaccccactgttaccacgggcacccattagcatacctttagccaagctttcagttaaatcactaacactagtacttggattttccgaaacagccttagcaccactttcaatggttaagttcatattagtaccagtatcaccatcaggaactgggaaaacattcaaagagttaacaaactccgcatttttaccaattcgatgagtggcaacacgtaccatatctctaaattgcttactatctatctcatttaaaaccactatttaaaacctccgcttgtgttattcgtcaagtaccttaacgctttgtacaatgacattaacggccttagtgtctattcctaattgattcttcaaattgaacttaacactatcttgaacattcttacttacttcagaaatcttcaaaccataaccaacaataatgtacacatcaaccgtaatttcgttatcttctgacttgacaacaacaccgcgcttataattggcacgattaagaatcccgtcaaatccatcgcgaatggcattctttgatgccatacctacaacgccatagttagacgtagctgcgccaccaacaacagttgcgattacaccgtttgaaatatcaatcaaaccatcttttgtcttgatcttaacagccatgtttcgtcctccgtcttattatctatatatacgtttattattttatcatagtaacgacataatcaataattaaaatacacctgaaaaaatccttttagtattgaattgcgcgaaaacatatgataatctaattaagtatgacatcacaaataaaggaggtttagcaaatggcaaaagattacgtaacaggtaagaagactacattcggtaacaaacgttcacactcattgaactcaactcgtcgtgcttggaagccaaaccttcaaaaagttcgcattcttgttgacggtaagccaaagcgcgtatgggtttcaaccaaggctttaaagtctggtaaagttactcgtgcctaatagaccaagagcttgttagatcaatattctaacaaggtctttttttactctaatatgctgttgtgcaacatttgtgcaacagcatttttactaaaaaagcatctaagtgacaaaccttagatgcttaatctgaaatttcatatagccagtaattacctagaagtctatagagacaattactgcagtagctatagtatacacgtttaatcatcaactgcatagtaagcaggtacaatcacatgcttatcataatcaatgtagattttatcattttctacttcagctaataatgctaattggctaatgtcttttaattcaatgactgctatcttgtcttctggtttatagtcaatgttataagtatctagtactaatgatccccagaatttttgagcttcaatccactcaaagctcattgtatctagtgcattcattaatctagcatcatcatacattttatgatcaccataatggagtgtagttactactacaaatttcatggttaaacctttctataaaaataagatagcctttaacagctatcttcagggtaatgttcttgcttttatagacaattaataaactcaacacagttattataacacaaaagaccacagctctcactgtggtcttgcttaaggattaaaaacgaaaaagcttcgcgctttctctatcaaaagaacaactatattgtagcacaaaatattattaagtgaacaaaaaccaccttgaaaattaattcaaagtggttttagctgacattatcgttgtttttctcttagcaaaataacatttacaacacttatattataacgcaaaaaagccaccccagacacaatgtccagagtggctttcttgatagatttagagaggaatttttcacttccttctttttttatactttgcagaatttagccggtacccattgcttatcagtaccaatcttatagtatttcacatttttaattgtttttacatcccatactttccaatttgagttagtgggaatgtatttatcttgataatgcccattactatctagcaatcttactttatagtttggattgttgttaataataggaacaaatacaattttaggtattttctctttaggctttgtaattggcttaggattagtcggctgatttgttttcttttctgaatgtaaatcaattagactaatattgccatctacgttaagaccacgccagttatcagtaaattgccaaattgctacgccttccattgatggaaagtaattaaagtcaggtgtatcaattctgcccatagttgcataagaagctacccataagcaattaccaaaacgcttaatcacttttttagtatcaatgttattacgtaaaacactagcacctgaatacaatccaaccttataacctgcattgtggcaaacgtccataaatgcaataattgcagcagtatttgatggaactgatctagtaactacattaccatcgccaacttcccaatctaaccatagataccgtttcttactaataccttcaatttcagcacggtgcacaaagaatttagcttcttttttagcacgtgaaaccgaattgctaaaagtcgcaaagtgataagcatgtaagtaagcatggttagcatgtgtgctcttaacttgagcatgtgccttaggattaaagtaacttaagccttcacttaactttgcaatcacgaatttagcaccatggctaatgtaatttgacatgctagtgggttgatatactgctacatccacgccaaaatacctaaccattattaacatctccctgtggttgattttcaggagcagtcaattgatcagtgggtttcagaatttcattatcaggtacaggagcaacagtaatttcatcgctgtcttccatgttagctaagtgcatagcatttactgctttttcaatcgcaccgttaattacgtttgcagtaacgtttttaatacctaaataatttaaaccttgtacaatcacttgactagcaaattcacgtttctgttcgtttcccatacctgtgtgttctgcttcatgaactgcataggttgcaagttgtcctactacatcaagtgccttgcctgctgtagttgccttgttaattttagctttatttctagcgtaaacacctgcgataattgcaattacataactagcaattgtaattcctaaatataaccagtctctaattgtcattttttaacttctttcttaattcatcattgtctttttcggcatctagccatttttttctgtagatttcagcatcctgttctttctgcttaatttcttcatccttttgctgtagcagtgtggtgagtgattgttgcttgctactatcaaatgctttataaaacagagttattgcactgatcacaccaccaattgctgtaataatgtatccccaattcactcatgacacccactttcaggcatcacaagcagttagataaacaaatccaaagattatcagatctccccatgctgaatgccccattcgatagaatggagtaaagatgccatgcgttaattgcaataatgctaaaaccatacaaacaataccaactattacaagaaatactttactagcaataattagcataattttgtatttaatattgttaatatacggaactaaaaatgcagatagcattaacaagattcctaacaaaattaggaagcagtcaatgtatctgctgttttcaatattctcaaactgtggaggataaatgaaataatggctatcatgaaacagccaaacacctttacctaaaataaaaagaccaattagcagttcacaatttctaattgttaatttagccttccactggtttagcttcttcattgctaccaccaacgatttcttggtattcagcttgagtaattaagcccatatcaatgtaacttcttaattcatcttgactgataaaatcgttatcaaattcaaacttgtaaatctcaaacattacttattacctccttcaacttctggtgtggtgttttgtgttggttcagtaggttgagtagcagctgcagactggttttgagccttaaccgcttgtaattcttttctaatttcacctacttgaacatttgacataatgaccaaagtagtaagcttatctaatttcttatcaagttgatcatttgattgagtatttgactgactgtttgattttaattcagtaacagcctcttttacatcttccacagtgtgaagtaaagcatcatctgaagtgtctacccattcatgagctgtgtagtcatacttttgatgtgtaaagtttggatttggagttttagttacataaggatagcctttatcactcatatcctttgtggtggtatatggaccatcacactctctgtattctccattaataattccagagatccaaaatgtattttcatttaattctgccattttattttcctttctttaaataagtatgtcgttcaatatcaacgacagtgttaattaactatgctttttgcataaaaaatagccatcgtgggcttcaattattttgattttaattgctcaatttgtgttttaagatcatctaaatcagattgcattacataatcatcataggcaggacaccagtctgttgattcagtacctttttctacttttaaagcatcaaatctaacctgagcagttgatgcgattttcaaacattgagaaaaattgccaatatagccaagattaaagtcgctatttgtcttggaattaaaataaccagatactttatattgattgccaacaatttgatgtgcttctacgcctgacaagagatatcgagagccatttgaagagtaaaagatgtaatttgaagcaaaattactaagaataacttgagcatctgtggtaaaccatagtgtttgagcataatatgtgttttgctctattggcaaataagtagttgcgtctttgtgaatacctttatttgaagctgcatcagttaaatatattgatcctaaattattagggtttagggtaatgaatttgccaaactgtatatttcctgctggtgttcttatctcacattttttagaattagcaagcaaattaggtcgaacaatgtcttttgctaatgccaattcttgaccaccaggtgcaaaaatattagccatataaaaactcctttctaagatataaaaaataagcgaatgtatcgcttaagtacgctgtcgtttatcatgaacgacagctttaattcttcgatgaatatctattgggtgctgccatctatagaccagcacctacatcttgagaagtaaagccatacaccgccaataccagattagtatatgaatagcctaaagtgtcgtcataatcggattttgtacggacagctaatgtggtgttgtccgtaaaccaaactgacatagctccgggactgccttcattatcacttcgcttgttatttatttcaccgcgtttcaataacggtgtgcgaaaattgttttcaagagtattattgtcagcatcttgataaaatacctttacaataatttggtaatattgaacatccgaatactttacatcagcttgactaaaatattttgtcatatcaatagtaaaagattgatggttccattcactgttattatcaccaccaatataaaaaatatttaggttttctgctccatttccattaagaaactcattttcacctagagcataacctagaacttttttgccatttatcgttaaagccatacggtcaccttctttattctgttatttcatacaacgtatttggatctttagtagcaagcttatcgtagtcagctttactaattacggtaggctttttcatatatcctgtttcaattgctgtaactctgttgttagtgttattcagatccgtttggttaaccttgcttgataaatcaacagtgatattagcattgccactatcatcagggcttatctttgcgccaccgtttacagtgatagttttaagcttaccagcgttgctaatttcagattcaagctgattctttaagctgtctgcatcagtctttaaaaataccgttgctttatcggctttaccgtccacagcgctttgcaaaccacttaagccactcacttgagtttgaagagccttaatagcgtcatttaaagtactgattgtaactttttgaccagcaataacagcttcgccaggctcatcattcatgtcataaattgcaatgactggtgaaccatctgctgctggtttaaaacttgcttcataagccgcttgagggctgtcactcttgacaaacgacagcttagtggcaagtttttgatttgcttgatccttagtgtagtggtctgtattaatatttccgtttgaatcaggttgaatattatctacagattttaccttaccagcttgttgtagtcttaaatcagtttcttccttagtgtagtaatttttaatggtgtcccctgtaacaaacttggaaaagtctaccttgtcaaactgttgtttcaaggaatccattgacactacagtatcagaaacttgcttacttacagtagtaagtttttggtcattttcactaatgctgtctttaagtggctgaacagtatcattgaaatctttaactgtggaagtcttccatgcgttgtagtctgcctgtaaatcagcaagtgctttagtcttatcatcgtttaactgttttaaagcagcatcacgttgatcagtaattgacttaacagctgcagttatgtcagcttgattactggttttaagattagctaattgctgatttgcagcgtcttgaattgatttagcttcagcagtccaatcactagataatttattgtatttaatagagtaatcagtaaaatcactgttaatcttagtaagtactgcttgtgcttgttgttgtgcattacttgaatctttattcaattgatcaatagtagcttgtgttttttgagtagcacctagcaggtggttttccatagcaataagactacttacataactatcattgataggcttaacagttggatcaactttaacttgaaaatagaaatcttgtgtagtatcaacaatagtgtcgccttgcttaatttgaaagaaacaagtgccactggctgtataacattggtgagtcatttgataactaaagtgtcctttagttcgatcaatcatgttgaatttaccactttgctcaccagtaccatcatcagcaactacacgatcactctctttgatttctgaaaatgaaacatccttatcagttaaatcatagggagaatcatcttcatttaaaattgttacgtccagcactaaacctttttcagtagaacgtaaaaccctcgtgtcgtctgacacgggggttattgatttatccgtttttaatgttatcggtcttagactcactctctttcaccttctttctgtgaatttcttgaagttgagtatttcttaaccttaaactttgattttctttttctagtttcgctattttaatggattggtttgcaataacagttcccaattcatttgctacaaattgttctaatgtattcatttttataaatcccaatacttacttggtcctcgccaatattgcttaatccatgaacctaatacaggttgatcactgcttgttacaacaacattcctaccaccaatctgtgcttgattaggtccaatgtgtgtaatagcaccactatttttatcatgaatatttactgatccagatcccaaattcaaagtataatttggagaatctaaactcaaaccaccaatttcctgactaggatttagtaaattagtggcatctccaaccgcaattgaaatgccatggttttcaacgtgtaaaacaccgttaatagttcccaaacttgtaattgtatcagtcttaatgtgtgatgcatccaaaatagggatatgagcttgatcaacaaagaaattgccagttacttcaccacttgaatcatcaataccaaacaaagcatgtggattgccataaatatcatggaaattaaaacctaagccattaaattccatataagaaccatcattgtttttagctctaattgccatgacgttattccaactggtagagccatcactggaaataggttcaagcattccgccaccaccagacttcagaaaattatcaaagttatctatgttagtaaccatttcctgcatgtggttagcaaaatctttaactgattcatcaagtactaaggtcttcttgccagctttatcagttttatagtgagcattacctaactttgccattaaggtctcccatgcttgagtttgggatgtaccttgcaaagtcatagcttcctgaacagcaccaataaaactatttgatctggcaatggcttgacgtgtggaagtgattttttcattagttctatcttcactagcttgaacaagtaggtgttcatagctagttggcaaatcacctaaagttacatttaaaaaaacgtgggctaaacagtcccacgttgtagctgtaacttcagctttttcagtaatttcataatcaggaaaactaacatccacatagtcataaagacttagttgagtaaagtcctgatcattatctgacatgtcttgataatcaagtgatgtttgaacttgcatatgaccatatctgtgttcaattagatagttcttaccaatttcagtagcttgatcaatatcagcttgtgtagcaacaaaactaccatcactttgctgaccgcttaaatcctgatcatcatgtttgaagtaaccactaatatcaacagtattaacgctatcaatgttaggatttacaccaaatccttcagcataaagtggaccaatcttaacagttacttccttattagattgatcaacatttgcgttgtagttggtgtcagtatcagcggaattatctgtatcagcatctgcagatgtaatatttgaatttttgtcatcaatatcatcttcacagagccatccattttttcctttgtaagttacttcaatgtaagtcttgccatcaccagattttgcttcatgaccattaacaacagtgaatgtctcaccattaggaattgaccagtttaaagcattcttactgtcaggagttgcataaatttcaaccttggaatgatctttaagttgattattaataaagtcatcaaaggaatgtggtttaactgaaccatctttagtgtagttaattgaactagattctacccagccatgactcgtgtgcatgtaggtcttaccgccttgagtaattgttttatcaatagtagacatcccttttttagcagtaactttgactttcttttgcttttcggcccagtaattagcatgtccgtaaactttatggcgtttcttgcctttaccagcccagtgccatgcatgtttgccactaccttttttaataacagtagtattgctagacaccattttatggtccttagtaaagtgatactttacagcgccatctttaacataaccataaccagagttgctgtattgacggtagctgtcttcttcagtaagtgataagtgtggtccatacagccattggtgtggtcctattctgtaccataaatcaccgtttgaattacgttcaaccatgtcatagtcaacaacagtaccatttttaacagtccagtcttgacctagtgacttaacaggatggtgatcaggaccaatttcaggtgaataaaatactctaattgattttcctttgccgtaagcaactacagcagagccatgaacagtaacacgagaacctacaccttcactatcaaacggattactgctcttaacagttaccgtcccactgacattgttaattgcataagcacctgatgtgtcaaaattgatccacttagaatcaatccagccaccgccatcactttgtgcaattggataccagctatcgctattaacagtgttaatttgatatttaccatcaggagtaaatgaaccatcattaacaatctgacctaagtgcagtttcatcccgttttgcaaagtaccaatgatcttttgaccatctacaggacaatcatagatattgatattgccgccagccatgtaagtgatacctactgaatcgtaagtgctttcccatgtagcccagccttgccaattatttttcgcaattgcttgacctggtacatacttagcgacaaataccgcaccagtatacatgttctgaatgttcttatcttgactaaaggtggttttgatatttttaccataggtaactttaataccagaatcacgtccaatacgttttgaatgtctgatattccaattatcaaaatcaaattcaccgccaaacagtcctaaaactgattgagtaacagtatcaccttcctgatcaggatcaataaacaaattacttgcctgctggccgccttgaatattcactttacttactttgttaacatcggaatagaaagtaaattctctctgctcctgcatttgattaaggatttgattgcctaaatcttgtgcagttgcgccgtttaattgaatatcatcagcaacagtagagttagcaagtaacgcactaatgtgttccgcttcaaccaccacattatctaattcgggagtaatgtggatgattttaaaccattgatgtacgtgcttaggatcacagtcttccataatccatttgttaggttggatttccttttggtgcaatcctgatcttggataagtcatagttaaagaccaaaactgattagaattgccattaacctgacaatcaattgcatcaggaagaggaataccgctactagtaaaatcactggcaatactgtcataaagatgtggcattgtcatcaaatcagagtagtcaccataatcaacttcaggaattgtacctacagttaatttcattagatcaacctcctccaatttggtttgtattcagctttagtgatagtagtgccagtttcagcagtaacagtgatagtattctgacccttccacaatttaggagtatcaaggttaggaaaatgagtttgtgtattgtatagattgccatctgcatcataagtatcaccagtagcaccattaagccaaaattcaccttccatattctcaaacgtgtaaggcaagccattgacgtacaaagtgaaactaccatttgcaatgaagtgccaatcaggaatagcagaccatttttcttcaccaactaccacaccgctatcaggcaatgggatataagcaattccatcaatacgatattggaaaggctgacaataaaacggtattgcacatacaccaacaaaatcactagttacatctttagtaacagtgaatggatctttaacaatagccttaaacacatatgttggatcagcagtgaatttaagatattgatatttcatccgcccatcaggatcagttggagcagagagccaatcagttacagaccgttcccaatcaaaccaaccacgttcaggtggtctaagaatttcaagattaaaggtttcagtcacattttggtaagattgattattttgtaagaaatcaccatttctaccttttatatgtgtaggatcaatgtcagctgttggatgaattaaatcccatggcttttgtacgaccatgccaaaatctgttgaagcatggtcttgaaaaatcagcttcacattatcatctaaatcttgcacttaatccccttctttctttaatcatgtcttgtctacggtcttgcttgtagaacggctcaactaactcccacagcttgcgaccttcaggagtttcaagtgtgatatgaatatcacggttttgagcgctcattttttgcaaaactaaaagcatggcttttaataagtcatgctcatctttttcatctttattagaaatacgttgttggttagcatttaaattactgttagctgtaagaatacctacagccttgccaattaactcccaagcacgagttgacttacttggaataagcggaacagccatttcaggtcctgcttcaccaaaaatacttggcgaacttgcaatacccccattagcataccagtgagtagaagtattaaccttgtgttcccatgcagctttagcagtaccataacgtccacggatatagtctttcatccatctcaattgagtaatagcattagttctccaatctctaccagcagatgccattttgcttgctggtaatgattgtggaataccataagcgccacttgatgggttagtaattctaggattccagtgagattcacctgggattccatttccaccatcaataatcaattccatataatgccaccaagattcaggaatgccggcttgttttaaccagtgtaagtgatcacctgtaggctttccacctataccatcttcattttctgacaagtgatcaccaatccaattaagagctttaccaccaagttcacgtttagctaaagctaacaaactaggtttaatcttaggttgatgcttagcttgatcgtgaagacctttaacacggtagtaaccatagcccatagacattgcatcagaaattctactgatacgtgcataaggtggggaggcattaaacattgtgcctttgcttggattgttgataataccaacgtgaccagctgcaccagtaccatgaccaaaaatgaccaaatcaccaggctctgttttagataagtttttacctaaatactgaacacctgatgattcctgcatagcaacagtagtacgaccaatgttaattccaaaatgtctaagtgcctgcattaccatacctgaacagtcagataaggtccttgacgcagcacccatttgatacttaacacggtcaaaagtatccttggcatattgcaagaacttagcacgtgaaccaccaccagagccaatggctttattgataaccgtccacatggcttgagaccatggattaccaaagtgagtaccagaacgtttactcaaatcagtagaatctttagttaaattagaaccaacatcatcaagattattggtaaacattgatttaaagctatcagcaaagtgctttaagctgttttctgctaactttctaagttctttcttgctaatgccagtaccatttgcaaagtgtggaagtgagagtgattgagtttgagtaccattaagaacaccccaaccttttctcaatagcatcctacgattattcccatgaggaataataatgtcattttgatcagttactacagcttcttgacgtggaccagattgagcatcattaacgactgctaaagtgtcatgagttaaacgaccatttgcatcagtacccttagcaaagtggactggattaataacagaactattaccaccaaattgctttaatacagcatcaataccacgaataccacggttgatttgtctgattgtgccacgcattgaatcagatgcataaccaaccattttatgcattgcaccgccaaaaccacgagcagtagcagtgcctaatttgattacaccatcgtgcaatctcttaacagattggtaagaccgtttataaagattactaaagtcttgttcagttgattttctgatcttatcagtagttttaccaacacttgaagtcattgacttgaaatctttaacagtcgctttagacatgctagagattttcttggtgaaattacctttgccttcgagtgacttaacagccttttcagcctgcctagaaatttgttcgccaaacttatcttttttagcagtcctagctaaaacattaagacgtttttcaacagtattaatgtttttgtgtaatgactttaattggctagtaccttttgtttttacactaacagtactctttttgcctttgatcttcttgattgccttagagagtgacttaacagatttaacacccttggtttttacagtaaccttatgagtgccacccttaatacgcttcatagccttttcaagggctttgatctgcttagatccttttaccttagcagttacagaaattgacttagaagataagcctttaagtgatgcactagaaacactaacgtttggtacagaaacacgacttgaaccagatgaatatgaacgtcttgctgtggatgttcttgtggatcttcttctagttgatttacgtttctttgttttgcgctttttagttttcttcttagttttaggagcagtagtaagtttcttaaagagtgcatcactgatccacttggacttgccaattcgactgttagcaccaagtaataatccttcatccacgagtgtttcaccgtggtgcggattagtcttagcaacggctttacggtctctactaatacgactggttaacttgtttaactgtacaatcaagccttgggtatttttaccacgctttagagcgtctctaatttctttagcgactttagctctatcagccttgtcatcttgttcatgcttaatcagacgcttacgctcattagcagtagaagcatcatttctgttatgacgttctttttgcttttgatgacgcacacggtcttcatcgtatttcttcttaagaagcttagtaagattaactaaaatcttagcagggctcttaccttcaagactatgtaaatcaacagtaccatttgcaaggtgaacagaacgaccaaacaatttagccatatcacgagcattgataacatcttgccatggaaagatccaacgtggtacattcacaccctgttgaacttccacagagccatcaggatttaaaatgccttccttattattagtagctggcgaatcatgaccatcatttaagatggctggataaccgtatttcttcttccaatcagtaccttcagctaagtgaacattgcctactttaaccttgccacctagaaatttaccaatgaacttaacagtactactgataccaccaaagaaatcatcccatgctttcttgatgccactgataataccaccaaaccatgaagtaattccatgccatgctgacttaaacagtcttactgatgcagagcctacatggccaaagaaatgagacattcctgaccatgcatgttgaacgcctttagcaataccgccaaaccatctagtaacagttctccaagttgctttgagtcccctagacattgcagaaccaagtctagtaaaccaagctgtcattgaatgccatgcattgcgtacgccacgagcaatgccgctaaaccagtgagacatgcctttccaagctgacttaagtcccttagccatgttcttgcctaagttactaaaccaatgagtcattccacgccatgctttttgcacagctttaccaacattaccaaaccatttcccaatgcctttccaagcatttttaaatgatttaactaagctgttcacccatttcctaaacttagaattgtgtttgtaaagtgaattaatagcaccagcaagcggacttacaaagtaaaaaccgacttctttccagtttttcttaaaccacttaatggtattgattacacccttagtaaatccattccacatgttatgtgcagaatagccgagattttcaagtgaccagaatttttttggcggtttgttcttttgccagcctttggtgaaattattgacagcttgaccaccccaacgtccagcatatttgccaagtaaagcaccaatgggagcgagcattggaccaactactggaatcatgctggttaatgtaccaccagcgacagcgccaacagcaccgccaatgtcttgacttctagcattagcattgtgacgatctttaacagcgttgatcacttcaggtgtagcaactgcagtacctgctaaagcaccagtagcaagacgcttacccatagagaacttagtagtagctttaattcctgctgaaatctttttgcctatttcttgaccaaacttttttgcaaaattaaagccagacttaattttgctccagctccatttgcctgcctttgctaagacatttcctgtagctctaaaacccttagctattgcttttccagcttttgtacctaaatcacttgctttagcccagcctttttcaatacctgtccaagctttgatgccagctttttctacagtagtccaagttttacttccaacttttctaaagccgctaaaagtcttggatagaacgccaccaaacttagcccaagctttttcacctttagtagcatctttagctaattcaattcctttgaaaccatcgtgtaatgctttaactgatttataagtagtaacagcacctttaccaatagaaaaaagaccatcactgactttacggatgcctttaattgctaccattgcaattatggcatcagatatagccttaacagcagtcttatttttagctaaatcacctgtagcagtagcaagtgtatgtaatgcactaccagaatccttgccattgcctttaacaataccaagtgctttaccaatgttttgaataatagctgcaaagtctttccaaactgccttaccaacttccacgcctagagagataacatttttagtgatagctacaatatcacctttatgcttatctaagtagccaataacgtttgatactgctttacccagctggtcagcaccgctcataacttctttactagtcatgatattcttcaaggcttgcaagccactagtcttagcatcaaagattggcttagtaaattcctgttctagtttttgtctagcaacagtcatagcttttaaagcaccagcttgactttgaccataacctttaaagctttcatcagcatacttagatgatttagcaatccaagtttggaattgcttttgtgttacattgccagtttttaaaagtgctctaagtttagattctgacataccagcaccatgtgcaagtgtagccatgaatgttggagcagctttggtaatacggctcaaggaggaataagtaactttaccagtactaccaattctttgcagtcctgcagacatttggtcaatttgctgaccagtcatcttagaactatcacctacaccagcaatggttttagccatttgcatagcacctttaaagccaatggttgaccagttaagcatatgagcttgcaagtttgatgctgaatcaccagctaagtcagtattggactttaactcaccgatctgcttatcaagggcttgaatttgtctggtattcatacccatgcctttgaacctaccgttgatcttagcaattgctaaattcaagttcataccctctgtgtaagcagacttaaggcttgatcctaagttagaaacagcatttgaaacagcgttaccaagtgcagatcccatgaagacctctttcaaggttctatgagtttcttgactttctttattaacactagaaatcttagcttttaatctatcccatggtgtaggattgattttcttttgttctgcttcaagaccactaatagcagatttcgctttatttaatgaagtcgctgtttcattcactctgatctgttgacgcttgtaagcttcactagttgcaccagattcagatgcaatacgttttaattcacgtgattgaatttcatactgcttagttaaattactgatcgaacttctataacctgaaattctagcttcattagctttataatgattgccttcagattccaaacgatcaacatacgattttgaaacagccgtagtggtttttaaagtcttttgagcttctgctaatcctgacttgtagtaagtgagagagtttttagccttatcctgttgcttagtcagtgattctaatctactagtagctttcaaagtttgagtagcattcttttgaagtgcagtactgatactttcataagcttttttgcccttatctgtagaagtatcaatttcttcttgctgtttctttaaagatttttgcttttcaactaagccatcaattaatctacgctgactttttacagcatcagataagcctttgtacttagcttcagccgcttcagtagtcttaccagcacttcttaaaacagcttcttgagctttccatgcactggtagtactagatacagcttgccttaattctcgtaacgtttttacaggctgatcaccgtttaatttaatatctgtaatcagtgtaccaactggtattcttcctgccatttatttacctcctttctgttttgtctaaacttgctgcaaagtcccaaagactcattggacgtttgtcctttggtcttgcactcattacttccacaagacggtaataatcagtgttttcataatcttctagggacatatgagcattaacaatcatttgttgttcttgataatcaaaatcttccagcatttcctcataggcatgtactggatcaggatcattaatcgttgtcgcttttggagtcgtctacttgtaagatttttccaattaaatcagtaacaaattcacttacatcttctggagcagaatcttcaatcttatctacttgtgcatctgataaatgcaaaatcttcttcaaaaacttttcttcttcatccaaaagattttcttgtgctgttaaaacatcaagaattgattggtcatcatcgtctttaaccttattaattgcaattgataattttgcaaaaaccttttgtgcctttaaacatgcacgtacgttttttacagttgtttcaacttcaaaagtagttaaatgaagctttttaccattgatttttactaacattgattgattttcctttcaaaaaaagaaaaagaacggctttcacaccgttcttaacaaaattatttatattaatttgccaccgctacccaccctactaattaattattagtgagtgcctgttgaagtagtttgatctttctttagatcaccagtaccaccttggtcagcactcttgtgagttggatcttcagtacctgaaccagcaacagtacctgaaataatccaatcaagcatcttgtcaaagttaaatccatcttcatctgaatagaatttttcgtaaactaaaccatctgatggacgtgcagcggcattaagagtgaatgtatcgtgtaccaaagttgggttttcagtatcagtacccatagttaagtcaccaccaggagtcaagttaccgtatggcaatgcaaagtaaagatcaacgccaacgtttgagttgtatgagtgagcaataacaccaccatatgcaagtggagtactatctttagccatgttaccaaagcctaacttgctatccttttcaagacctacgattgcatcatagaagttatgtggaatgtcgttagcaccgaaagtaccagtaatttgatatgcaccaaagtgttgttcagcctttgcgttagaaccgtaaacagcttgtgcagttcttgaaagaccagtgatgttagcttgagtagcacctttactggattccaaatcaattttaaatacaccatctttaccaatgttggtggtcaaaccgccctttgattcatcggtaacaagcttaccgtccttatcgaacttgaaaacaagtaaatcatttaaaccttgaagttccatgtaattctcctttttatctgaaagctaattgttggttcaccagaattggggtcgtatgtgtgacctgcaaaactagctacaatttgccaaccattagctacaaaaaaagacatgagcgagtgttcaaaatcgttcatgtctactgttgtttttttactataaaaaacgtttatcgctaaacgttgtatctgttccgtgtattggttactgcctgattcatcaaaatcaaaatccacttcactaacgagtacatccacagattcacgtggtgtacgttcgctagttccaaccgcaaaagagtaggctttatgcaatttgggaaaattggaagaattaagaagatcaactacctgctttgcaacagtagtcatttatctaatatctccctaaatttttcagcattagcttttagtactgcatctgcagcttctttttctgcatggtctttaaaatgtagatttgatatttctttttgagacatatcacgtgttccatcattaacaaaccgtgcgactaatgcattatatttatcttcccaacctacagatgtatcaccagtttgaccatcattgatttcataaccagccttataagtaatggcatctctcatgtgcttagacttacgaccatgaccagctgaccttgcatgtgcatagcttgcatgagactttggagtattctttttaagaacttcagcgtaagtcttagcaccttcaccagtgatttctgctttttgattggtagatagattaactttcttagtaattttatctagccaatcatttaagcctttatctaaatcaaccatcacgatcagtcactcgtgtgagagtgatcaaatctcctgcagttggattttgaaatggatcaggattaatatcactcacttcataaagcttattgttaagcattgcatgagtgataccatcataatcacgtttgtgatgaataactacaataaatgaatcatcacgatgatgccctttattttgaactatttgaccagtagttaatccccaatgtccacatagtgtaggttttgcgagtcgtttaaactcatttgttggaagaccgttatcatcttcagtatcatcaacagtaccaaacacaattttatgaattagtctgtcccagctctgaagttgcaccatcgtcattcaccacctttgattcatcataagtcccacggagttgacctatgatttgttttgctgtagttgatgacacagcagcagagggatgcaaaaaccagttagttgcaattgcattaacagctagcttatacagctcaaacactgaatcatctttgtaaaaactatcatcagcatcttcaccaattgcaccctgaacgtaattttcagcacctttcagtgttgcttccatacgttcttcatctgaagaatccaatgcatcatcatcaggcaagtaaccaagtgagcgcttaagcccatcatcaatttttaaataagtggtcattattgatcacctactttctactacttacctgaatcagtgcttgttggtgcagtaactgcttgcataagcattggttggctttcaaccttatcaaatgaacctgaaatcatcgcctcatcatcccaaatcttggtatcaaatctgttcaatgcacggatcgcagtttggttacgtctaaatgccttatcagcaatgttagaagtaagcaatgacatttgttgacggtcgtacatgtgaataaattccttaaagttaccaaagtaaaatggatggctttgatacttgccaccaacagtagtgttgttagaaaggtatctgtcttcaaccacacgaacgttaatgtattgcataccatccatgttgaaggtggtttgttgagtacgtggatcaacgttcatggcacgtgaaccgtctgacatacgaaccttagctaaggtcaagaaaccagacttgttagttaacaaggtagcgccaccccataaagccatatccaattcacctaatgcatcaataatgtcatcaagcttagtgatagtagccttcttttgtgagttaggaagtaaaccaacaatctttgagttataggtaacaacattcttacgtgcaatgtgttggtttaaccatgcttcaatatttgcgtttgagtcattgattaaatcatttggagcaaagaatacatcaccataatcatgaatgttatagctaagttgcttaactgatgggtaattgccttccttaatgtccttatcttgccacttatagtctgaattattagttgaatcatcaggaatatcatccaattgatccattggaataatttcagagaatggttcaatgtttctagtaccgtgatcagtaccaacattttcaatagttactaaatcacgcaagtcatcatattgacgcatcaaagtgttaatttgagtttgttgatcatcaggaatagtcaaaccagcattgccatcagcagttgaacttgatgataagttttccatgtacttcattgggtttctaagcatatccttgaaacctgaagcaatgttcttcgacttttcttcagtcttattttcaacaggcttattagcaggcttgttaaccttttgagcttctacagcatcgtcatagttttgcttagcaaaatcacgagcttgaacagctttgttataattttcagccgtcttcttcatatcttcagcagaaacagattcaggatcagcttcataattcttttgtaaagctaccttcttattaaagagatcagtaaccttattacctgcttcaatccaagcattttgtaattcttgtaaattcatacgttctcttctttctattgccataacaaaagggacaagtcttttttgacttgtcccttatctgtatcttgtttattctcaatgggtttagagtcatcatcggacttttcatgaattaatgttttaatcttattaattgcaccgctacttaaaacaggcactccataagcattaacaaccgctggtgcttgatcattttcaaacataatagaatcagcaaagcctttatctactgcttgtttagcattcatccaagtagtttcacacatcatccggtaaacttcttgcttatctaaacctgttcgcttgctataaagatcaacataagcttgatccatggaatctagtgattgcattgcactagcaaaatcatccacattaccttcaacaccaccgctaactctatgaatcatcatttgagcagttggcgacatttcaactttgtcagccgctagtgcaatccatgaagcagcagagcaagcttgaccaactacttgagctgttacattgcctgggtacttctttaaagcggtatacatttctgaacctgcatcaatgtagccaccaggtgaattaatctctaatgtaatatcttggccattagcattgctcaaagcctcatttaattgattagggctagccacttcataccctagaaatgaataaatatcacctaaattattgggtacgattattcccttgaccggtactgttaccatcatcttcacctccttcatttactggaattattggtttatcgggagtgggcaaatcatcaggtaaataaccataatgttgcaaaacataccgtccttgattgcctgacaaaatacccttgcttgataaatcaccaatttcagatgcaaagttatcaccagttgcatcaatagctggtctaatgtcataagtaatttgactgttcaatttattggatagctcactttgaaccgcaccagcataacgattaagagccttagcatattgcccaccaatttgagtgatgttactttgctggtcaccttgaccattaagatatgagtcaggaacgccatagactttagcaatttgtttaccagtccaatctgcttgctgtaacagctttgctacgtcgcttttaacttcaagcggttgataagtttcaaggtcgtccaaaacaattgggccattatcagagctattaacctgacgcataaattcacgtgatctagctgattttttcttccaatcaagcaaaccacctcctgtaactgataaaattccaggcgcttccacagattgagagagagcatgtagtgttaatttattgcttgcattcttgatattcaattcattagctaaaccagtaagcggtgaaacaccagtcttaccaccgttctttgatacaagcctgatatggataacatcactttgtgggacattttcctttgtttgaatatcaggttcatcaaaattgatattgtaagttagccctgatccgtcctctaagagcaatacctggacttgagacggtcttaaaaactcccaatataaatcaacgccattgatgtttctccatctgtaggcataagcattgccgtctagcaatagctgtgcaaacatcccttgccagaaactaaagccattagttaaattggaaggattatcaatcagtgattgcgctctatctttatcagcattcagctttactaaagctaaatctgcagataattgtgaaatgagtgaaaatatatctgagtttttcaaagcagtatcagcagaaacatagtcgttaatagataaatcgctcttgaataaagtaataaattcaggatcatttaagctgtaaccagttacattgcttttatttaaattaaaaacgggcattattaatcacctcctccctgaccatgtgggagtagatcaattaataagcctgttaaaagtaaagcaattcctagacctgcaaaacctgctattttattccataaaaaaagagctatgacaataaagccaaagcccaataaataaaggattacatctaagaatttccaaattttttcaaacagcgttttaattatcacccgtttcacctcccaaaagaccagaatcaggattttcaaaccatttaagcacttgttcttgtgtcatccgttctacttgatgtgatttgtcattgatcaatccataatcttcaaagttgtacattccttgatacattgcatcaatttcagcatccacaacatcaatcttcttagtagccttgtccttatcaacttgaataccaatcttgtcttccctaataacagcatttaagagagccgtttcttcgattggatcatcaaatcgtgtaatttttccagtagcgtaagcttcttgcaagaatttagttggattagcaagttctgaagttcgttgtgcaatatcttgaatcaaccaacctgtatttgcattaaggctttcagtaatatttttaacttgataactaccataccggtcatagccaaaaaacttaacatctagtctatgcttttcagtaaattcaagaatccatttataaacttgttcgggattgataatgcctttttcatgactagtaattgtgcagtaaccttttttagctaattcacgataaggcaagccatcttgtttttccttagcttcaatacttcctgcttgttgccatggaataaatgaatgttgcatcatttgccacttatgcatcccttcaggagtggtatacggaaaagcaaaaccaacagctgtattatcagaaaacattgagtagtcaaaacccatataacaaattaagccatcgatcttgaaatcatcattgatagctttttcaacgtctttcaaattcaaatagctagcagttgattgtttaagccacaaattcaagttcttattctggaacttatgaagcgtattagtaagcattccttgatcacgttgcttaattaaattgtcagttctacgcttgcgttcttcatctgataaaccaattaatggattagatttttcccatgtttcaggcttgaaagtttcatcaaggtcatcttgcgcccacacgagacagagagagttatcaccttcacggctataatctttttccatgatgtgctgcatcgtaatttgttcttgatgaaacggacttgttggatcaggataagcagaactaattttgatgaattgatgatatggaattacttgtgcttgaccatctgtaatatcagtcattctatcatatgtatcaagagcaccggtttcatcatagatagctaaaacattgtgggttgaatcgtatttatcagcttcataactgattttccataccttattgttagtttctttttcaatgatttggttagtctgtaaatcaagccctgactctttagctatggatgcaaacggttcaatcttaatgactgcttcaagcattttcttaacataaccaaacaactttgttgattgatcagatgtattagcagtaatcaagaagtccttgttagtgaagttaagcgtatcaatcaagacagccttgcacatttggataccagctatttgtgttttgccttgtccacgtccaacacttatgtggatgtcagtgtatcttctttcaccgtttgcatctttccagccattaatcatagctagaataaatttttgccaatccattaatggaagtggtttatgtaaatcaacgtctggaatgattgatgcaaacttaaaagtattttgtacttctttaacatcataatggtaaggaaaatcagatgtattttgacgtttcaagtcttgtaagtttctgaaacaagcaagcttagtaatataaccagctaatcttttaccatctaatacatcaaaacaatattttgtggcatcatcattgtatttaattctaatgtcgttatagttaattgcctgataagcaccatcaacgtcatgagtttgtgttaaatcaattttcattgcatcaatcacctcttttttactatttttaggcaaaataataggcttaatcacaaaaaaacgtgattaagccctaaaaattatccttgcatttctcttaatgcatccgtggcaactttagatacgttaattttattttctttcgcccaatcatttaaagcttctggaatagaaatatttcttcttacagttttaccatattgattgagccactttgtcatgttgaccgtaacccatgttacttgttggttatcttttaatttccattctttaggattttgaactttaggatatttttcttcaccatctaacattgcagccattgcatcttcagcatgtactaatgcttctggaatagtttcaccatcagttaccataccttgaatattaggtgaagttacaacataataatgacctgattcatcattatattcactaagaattgcaggataagctacgatattttgcttcatattttatgatatgccaaagctaggaggcttaacctcctggcttttctaatccagcctgttcaagaatggctttttcagtcatttttttaagttctttgctgtgcattggaacttctgtttttcttccagtagttggattaaaaaatcttctatgaccaccttttttaggtaattcaataaaaccattcttctttaaaaaacgaaccattttagctggcttccaaggcatatctttcacctcctttcaatttctaagtatattatacacaattatttgtgtataatcaacaaaacctaaaataaattaatcacttaaaaaaatctttcaagctttgaacagctgtttttttatcatctgtagtaggtaaatttaaatccatcatttgacttcttgctttaggacttaatcctaattctttaccaatggtattcatctgtttcaacgaatcagacatgatctgataagctggatttttcttgtatcctaaaaaattcttagcaacttccttgccatccacaggagagataacagttttatagataggttgctgaataccatgttcaaggacttcttcataagccatgcggtaggtgtcgtaggctgaacagtattgttgaagtaaatattcatcagcacgtaagattttgtcattcttattgagataagtggcaagttttggatacaaatatttgccgtaagttccaagccatttaggtgcttgattaggtactttcggctttgatagatcaactttgttcatgtttcagccccctttcaaaaactttcaaatttttgtttgtgacacaagaaaacggcactgatgcggctccctagacgttaaaaaacggggcgggggtctttttatttttgattcatgtataattacacttacaaaatttaaatctcttagaagcgaattttcagccatttacagcgtgatcatttttcaatctagccgccaagttagcaatcaattttacgtccgttattggcggattatctgttggtttaccatgaagtcctgtgccataatattgctcttcaaaacgtgttttccagtagtggcatcttccacagctggtgaccatgttctgaagattcttcatttcttctggatacctttcaactggtagtacgtgatctacaatgttaccttcatttaattgacctctagccttgcagtactggcatagatggtaatcacgtttaaaaactattgctcgcatctcacgccattgcttcgaatgatagaatttgttttgctctgtcttgaccggattacgatagcgagtgatgtgattgtatcgccattgcgactgcttgctgcgtttatgatgcaagcgataaaactcattgcgttcttgcaattctttttcgtgttcaatgtgtttcttgcaataatgatttggcatcatcgcaaactcatgacagtttggaaaacgacatctgcgaactcgtggcattgactggctcctttcatttgataaacacaagcactagggcttgaacctagattaatagttttggagactattgtgctagccattgcactatgcttgcaaaagaaaaacacctggaaaatattcttccaagtgtttattaatcatgttgtacttaaatgtctatttagttgtcaattgaatgcagacaacaacatgaagaaaactaagattgttgtgttatgacatcggacctttttctttactatccgacaatacatattgtgccatgtttcaatccgcatgaagttcactgtttgtccagtgattgtccactaaaagttcactggcaaggtaaaaaataaataagctaaattgcatcagctttcacatatacatgcagatcaatatgatctgcaggttcaacatcacattcatcttgccaatgatcataaagatctgcaaactcattaagtgcgattggtttaagtactttataatagtaggtcttttcatagggtagctgcataattaattgctcttgagggatgtacttaatatagttacctattaatattagcttactattatctgagcagttaataatcgtttggcatattgcgtcaacaaccttctcaatgctaaaagaattaaccatcattctctcttgtccatcagtgcgattactatgacttgaagcgctagacaattgaggactagacaaatcagttaaactacgtccacatcgcctagctaatctaggaagtttatattttaataacttatcaacacggttagcagtcttatcaaaatctacatcagaccaaatattcacaacaatcaactccatataataggtaagaataacaattactaatacatctattataagctataccaagcatttatgctttagagttcatataagaatcaagcccatttttaatatacagatttgatgaattcttcacgcaataatatgagttatccataacattcatccaaatgattttgccagttcgaacagcatatccctgtttaagaaaatgtattttcgcataattattattagcaattttctttttaaaaataattttatataaatgtattaaagtgtcagcataataagtagttgaatgatcaggtgctacaactttatagtaaaaaatctgttttggtttaatactatgcttttcgaaataagaattaatcgtagcttgaccgtgatgagtaacttgtgcaatatgtgcgtttgaatagccaagataattaagctcttcagtacgagcatagtttttgtcttcagattgacgtcccatcggcaaaagtctatggatttcttgcattttaggattagattcaggtaccttagaaattgatccaaaccgatcttctaatttatgaattattactaaagcacgttgataattagttaattccatattagtcactcgcatcgatatacttcttaattgctttagtagcaatgactgacattggttcgttcattcgttgacaataatcttttaattgatcgtaagtataagcgtcaattgttacttccatacaatcacctcttctattcatatccatagccaactaaaccattctccacaatcttaagtgcatcattagtatttcgtgcaattccatgaataacattgaatttcatcaacattttatggaaagctatttgatcaggacgcggtttaccagtagcatttttcacttcaatgtaaaaagcttgatgatcccaatcacgccagccatgcaagtcaggatagccagacggcaagcctgtagtaaaaaatctaccatcaggcgttctaattttaccgacattagcacggaatatatgacaatgatgttgtgagacaactaattcaattttcttttgtatactatgttcactttccattgataaacccttccgtgttgaaaattgcgtctgattcattaggcaatttcatcagtaatttcatgtcatccatacttgcatgttttttctgtaagattaactgtgatgctttaagtgggtagaaatcgcctaaaaagtcatcaccccaaacaccattttttcgataaggaaaaaagtactcattagcgacttcatcataaagtaatgaatctggataaatttttcgtccattcttgtcatgaaaaatagcctttttattatttaacatagttgttgtcctccaggttatgaattctttttgcaagaattacaattgattcccacataaaattatcttgtgcagtagctttatgttgcacagcttcagttaattttttatttgcttgaacttcttccaataaagaatcaaataaatcattacttttatgaatttctttcataagatcgttgttagacttcatggttttataatctgaaaacaaattcagtacacttatcgtagggtaaagaattgcaaataatacaagcagtgcagttttcattacttgtcatccctaactagcattggcttattatccttgttttcttcaggaataagttcctgttgatcagcctcaagacttacttgaactccattgccatcaaaagcaatgtcttttaacttgtttaagttaatcttatgagtaagcaggtctgcatctaattgcaaaactactttattaccattaactttgaaattatttgttgttgcttgaaatttaattgtttttcctgtcatgtttattatctcctgttaactaagcattaaatatgtaaacgatatactggtccaaataaacataaggaaatctaatttttcatttttaaaacaaaaagaaattaagactattaaccagttcattaaaattaatgttaaattgaaatattgttttgctgtcatttataaccaatcagttacttcatattttgcattctcatccaattttcgcccacaatttggacaatacttaataggataaggcaagcctttaatcgttaagtaccacttgccatccatttcatttagattaacgtgaaatctattcatttttggcgcatataaatccggtccatcgtgaaaagcatttaatgtactgcaaagatagcagctacttgaaactgatgtcattcgtcttcaactcttttcattagttccttcggtggtcgattatatgtaacatgttcacattttgtacaaatataatagtcgctaaggctaaacagcgatgttttatatacataactgtgatgacaaaataattgcttaaaaaatagtttcactctgtaaaataaactaataatcatttatctaatctcctaccacacatagaacaaaatttgatttttttatcaagtttaaaggaaaagtcatcataataatcaataagaaccacttctagtgaattatcttttctgataaataattcacagccatctgtataaaaagttttcatcggatcctctgatccactttcaaaatgacaatatggacagatgcttttttttgaaactgcattcatttttaattttcactttctagctttctcccacacataggacaatagttaatcttgctactctttgatacataagtaacttcgacatcacaagataaatttaattcatttccattaatataaacatctccattttcatatctatcaatacctgtgtacccatcttcgtatgtatcttcaattgaaataattgatttttcattattacagtaatcgcacataattattcctccgttaatcagtaatcacaatgtatgcattcactttttcagcgtggttataactattctttaagtccctagccgcttctttaggtgagtcaaataatccttcccaagtttttgcttcattgtcactactactgtgtatagttacaacaatacaacgatcttgttcataataactatcataaaaagtcgagattctaaacagattatattcatctggatcattatcccaacacattaaaatatcgccatacttgtaatcctcattagttttcttcgttcttttatcaattactttcattgccatactcctttatgtactcctgaggcaacataccatattcattaaagaactcaccacatagagcaagatctgatcttacacagtaatctgtagccattatgcgtctagcttcttcaagacccaatttaatatcacgtccgttttcatctttcattttcatgctcctttaatcaatagttatcgttagcaaactatatctagcaatgtccatatctccgcaataagggcaatgtttaatatcatcaatttcagcaataataaattctctgccgcaatgttcacaatggtattcagctaaattatgattgttcattttgatgttctttctttaaattgcgtccacaccagggacaattacctataaagattttgtcagtttcctgagaatagcactcaggatcaggatgagaaataattaaagctggatgatttttacaatcgatgtaagtaaacattattccgtcttcaccattcaccttattaatctcatctggatcaacatagtcatctctgtagtagtcgcgtcctagctttgtctttgggttgatttcacaatatttacacaaatttaaatattctttcctctcaagtgacttccacactgatgaagtgtagtgaattaactgataccgtcacaaaaaatatcagcggtgagtttttgtatagcattgctaattggtaaataccgatatgacatcttttgccaatttgtcacctatttttcttagcactcaatatagtagactgctaatcgtggtgggttggctaaaaatgtgaccagtttgtggtgagtttgtggtgggtcttacgcctacagcctgtagtgttgtggttagtgttactacttttttctttaaaaagtaaattataaaaaagaaaataaatataataatataggcttttaaactaaccacactaaccgaaacacgtcacacccctacagcccaaacggtttgagctaccacatatactcaccacaaccaaccacaactaaccgcaactaatcacagccattaattccaatcaaaatgaagtggttctttctttaattggatgcctacatagcgagttccatttctttctttggttttaggcaatttcttagccatttctctaccaaatttagtcatagacatcaaatgttcattagattctctagcccaatcacgatatgcattgtataaaggtctacccatgatagtgtaattgctaccagctttacagcattcatcaagaaatgcttcaagtggatccatgttttcacggtattgcttggatgcatcttgaacaacttcagggtctttcaagccttctacttgccacatgattgcgccttgaacgatccaatttaagattccagtccattcagcttttaacttgttttccaaattcttatcaactttgttagctggaatttgtacattgaatggaacaaccttaattcttctccaaataccttcatcagttcctctaatgaatggcaagtggttagtagccatccaaatcttgaatttaggatcatattcaaattcttgaccatataaaaatctagctaggattctatctccaccagttaattgcttaactaacgattcatctaaacgtgaaccttcattagcttcagaactggtaactaaacgtgtattttcaagtcgtgcaatatcactattagcacttccgcttgaattgtggacgatgattgactcaactgacatctgctttgcataactaccaagaatatttctgatagtattgataaatacagatttaccgtttctaccagtaccaagtagcaagaaaaatacttgttcagcagtcgatcctgtaattgagtagccaacagctttttggatataatgaatcaatttctcatcatgattgaaaatttgttctaggaagtctttccacataggacaatcaatattgtctgaatattctgatgcggtttgttcactaaacatctttttaatatcatgatctttcaattcaccgttagttaaatcaacataaccagattcagtgtttagaagcatgttgtcatgatcaaatacaccgtgatcaatagttacgtacttcttaaactcctcaatcatgtgtatttttgccatatgggaacgtgattctttaatgaacttattccattctttcattgctttatctttatcctgctgagtagcaaagctgaaatcaggattttcagttttaatcaaattaacaactttttcagctgctaactcaatatgccgtccattatctaattcccaatatgagccattatagaaataccaagttttatcagctgccatatatctgaatacatcaccgaactgatcatttaatctaagtcctcttcctgtatcatcccatgaacgagcaacagcccgttttttaggtttgttccagttaaagactagatctggctctttcccatcttgctcaggattataaatattaacggcttcactgattgctttatttaaaagggatattccataagtagtagcaccacgtttttcatcatatttatctctcattaaactggaattacgaaaaatcgtatccattttgtggaagtctctaccagtccaaaatgcaaggtcattagcaaatgccatatctgcttcagagtgagaattatagaattgttcccagccgcccttcatgaacatggtaaagcgagtaccagtcttagatttttctgcacgttggatgatgtcaggaatagataaatctagcgctgtaatttcaggttcttcaatcttatccggcactgatttatcagcaccaaataagaaattataaagagcttgcatcttttcttttgaaagagtgacaatcttaggaataccaatactgttcccagttagtgcaaagaaacgcccttgttggtacatctcataattgcctttacgtctgcgattgcctggaatctctcccttaaaaatacagtgaatacctgtaccagattggctgacttccatataagtttcatcagtcattaaacggaatttgtttatcagattgctaacagaactatcaccttgatgccaatctgctaaatcatctgaaatatgatcaatatcaagccctacatatccgttagtaaaatagaatgccaagccatcagcacgttcaatttcatctaatgcttttagtgctgtattaaaatctgaccatgtactaggatcattagatttaccagctctaccgttataaggatcaataggaatcttggtatttttattccgctcctttacccatttaagttgaaacaatccccattgctttaaacttcgcaattcttgagggatgttttcataggtaaattttcccatttacttcactccttagaatggaatatcattttcggataattcatctgttgaacctgtattacctttaaatggatcttctacagtttcttgctttttagcagcttgtggtgggaacttagtcttttgccatgaattagtgaaggtactattttgtttgcgagtttcacctttgtaagtattctcacctactgaaatgtagattctaatgaattttccttcacatgctttcatcaaatcttcttttgacttgatgtatttatcaatttgagcttgagttaaaccaattgcatctgcaatatttgccaaatctgctggatcatatgagcctgaatcttgaccggtttctttatccttagcagtccaaacatttgcaaagaagtggcgaccatgtgtttttgcattagtattagctaatgcagaaactttgtctaagtctttacgaactagaaaatcaaattgcatattttcatgaccgctagggcttgcatcaccatggacgcttacaatttgcatttcataagttccctttggaaatagttcacttctgttgtttgtcttttcgtttaaattaataaaacccataattaaataaatcctttccttttagccatgtgccaagcccaaccattcttataatgttttgcctttgcatacatggttaattctttaaaactggttagttcactaacctttttctttgctattagatcaatatggaatttttctgctttaatagctcttaattcttgatctttcttttgtttaatttttctaatttcaattgaaaaatcatgaccgcagatagggcatttcacacattctgctttaataactgcaaaacaatcaggacatgttttaatctgtaatccttcagtactaccgctatctttgcgtggatgtttctcacgatcttccaaagtccacttgtaatcagtatcaggcaaaccaaacctttcaaagttaccaacttgatcaataatgattgcgtgtttgttaggttgatacctcatggctctcattgattgctgtaagtaaattactaggctttgtgttggtcttaatagaactacacatgaacagtcaggaacattaaagccttcacttactagatcaacattgcataatattttgatcttgccttctttgaaatcaaccattatcttgtcacgtttactttcaggagttttagcatctgcatgaactgcatttatacctgcatccctaaaagactgtgctacttccttactaaagctggtagaatggcaatagataatagttttacggtctttagcaaacttgagccatgattttacaatgtcaccatgtataattgacttagtgtaattgtttaaagatttttttgtataatctcctgtcgatccactttttaacgttgatttatcacctaactggtaaccatagactgtaaatggtgccagttttttattttcaattaaccatttagcagttgggcctaataccatagctgaataaatatctttaaatcctttaccagataaacgccatggtgaaccggtaaaaccaagccttggaacatcagaataataattaaatattttctgatatgttttagctcttgagtgttgtgattcatcaacaatgattaaatctggtttggctaaaatatttaatctatttgctactttacctaccgtgagaatggtgcaatggtttaaatcgacaccctgctgtttaaaagaatctttgatctgctttactagttcttggcgatggacaaagaataatacatggccacctttttttactgttaatttagcaatttcactgattactactgacttacctgatcctggagggctaacaattaaaacgccttgatttccagctgctagagcatttctagccttatcaactaaatcttgctgataatcaaataattgaaacatttaatcatcttgcttattaattttctgcatcatcttgataaaatcactggcatttctggtatgatcattttcttgatcaatctctcgttgaatatctctaacgagaccagataatacaatgccatgaccatgatgcattcgaatttcatttccatcatcatctaaaccaatgataataaaatgcttgatttcgttattagtaatcttcaaacaagtttctgcaactttgtcttccatttcctggtttagctttaagtcttcatttacatttttgttaaacattattgtttctcctttgcattttctttaactttatcgaccgctttttctaaatccgacttttcaaatttgaaaaagtcttctgctttgctgccttttcgctcgtctaagcggtttttagcataggtatctatacttccctgcatgattaacccacgctcacctgactgtggtttttggatcatacgggcaaccacatcacagctacccattaaataatcccgtggattatctctgatatctggaccatattgcgtaaattcttgaccacttggatcagtaatttggtactttgcttcccaagccgtaactaagatattgatgttccatttaaaaacgctagcgataaatctaattaaatatgtattccattcattataatcagaaatcttgttagctaatcctgttttggttcctttagccttttcgacaaaaaacaacttctgcagactactgatattatcgacaactaggttgtcatattgactaggatcaaaaaaatcataaaagtcatttaagtcttcgattggttggtctggatccagaacccaaatatcatcgttaccttgccaaaatctcactctttcaaagcttttatctaagctaagcaagtaactttttcctttaagatatttactcaatgttgttttaccaacaccagcaataccgtagacaagccatctataattaggctttctattttcactccatttaaatgctggcattattcttcacctgcatcgcgaatcaaatttttaatgccctgaagctgattaaggacattgctagtaattgctttttcatatgcttggatcattactttcttgaatgcttcccactcatcagtatttttaattgcttgaaaagcttgtcttgcttcggatgaattaaattctgcattttcccatctagcagcaaactttaacttcgcttcttgcttaatgctatcttttaaccaatcttgatcaatcatcgttatctacctctttatctaaaccttcattacggaccttaattactgcttcttcataaattgatcgaaccacatttgctacaacctcacttgggctagcagtaaatttacctggcaaatctggtttatttttattcagccaacgcattgcgccagagtaagttttgccattctttttagattgatagactaaataaattacccaatcgtctgcatcatcttgcatttttttaatccaatcttgaaagtctttaagatccttatcttccatagtcagccatctccattccgtcaaaatagtcttctaggaagctggttaattcttcacgattatcacagttttcaaataagtactgatacatatcctttgcatctgtgaattgacctttaaccatgaatttatcagcgtcatcagctaactgttcttcaataaaatcaagtggtgttctgtactcacaattctgaccaattgcatgaactgtattccctacaactaccgttaagcaatcccaaccagcataaaaatcacgctgtttttcaatcttttggtagttgagttctttagctaattcttttccttgttttgcttccatgatggttttctccctgtttcgtactgactagtaactacatcagtaattgcccaaattcgttgttgtgtttctttgctaagttccatgagttaacctccaataatttgaaatgctgcatcccaaaagccatagcacaaaagagtgaacgttaagatcacgactgctattaagatgccaccaaagatagtttcataatggctttctttatgttggattggtttattaaactcacggtaataattcttatttagcatcccaatcaatttcctttctatgttcattcatccaaatagcagctggatattcaaagattgtcatcttaccgcctctgcctggatgaatattgctacaccaatccggttgaaatggataaagaatatttctttttacccatgcttgtccgtgtggcttagcgtatttcttagcaaattcatcaatactgattgttcttccttgcagttgctcttcagggacatagccacgttctttcataatttgatcaactgctttttgaagttcagtgtcattaatgactagttgcattgtcatcacctggcctatacttctaacaagttcatttgttctgcaacgggatgaatatcatctttagctaatagatcataaatgaatttcttgcctttttgagtccatttaagattgttgtgaactccatgttgaccattatttttttgataatcatatggttcatattgcgtataacctttgtcagcatatttttgatataaaacccaatgtttaccttgtttgaaaataatgtgacgtttattcaactctttatttaaagttttggctgaccaaccataatctttcgcaatttcggtagttgtcataagaccagggtttctcatttgggagtcgaaataatcaacctttggtttctgttttgctaattgctctgcctgatctgctgctaaacgcaaagcttcaggcaatgttttaggaatattgaatttacttggaatttcaatctgttgtttcatttgattaaacaaactcacatattgagcagtaaattgatttccttttttaccagtcatcttatttgctacgaactcgcatccctgtttagtgagcagataattaggtaatacttttccttgcttactggtataagtgcttggaataaagaactgacgtgagctcaaatttgagctctcctctatatctttgatgtaagtacgaatatcacgcattaagttcttgtgttctttaccaatcatttttgcgacatctcggctgtctaaaactgactgaccttcaaaatctaagagtttcataattacttttcctccttatcttctctagctaacttaaatagaaattgtgttgttactcctaagtagtcagcaacatcttgtaatgaatcagctctgggcatacttctatcccatttgctgatcattccgttggacatcttcaagtcatgttcaatctgataaattgacttgtgtttttcctttgcaatgtctttaatcactgaataaagtgacatattagactcctttcttagattttatattgatttataatagaatttgttctattatatgagtataagaaataagccaaatcgtaagacctatgcttacaaaaggcggttcaaaagattttttgctatgtttcctttgaacagtttttattataatagcccgttttctaaattgcaagcatttattttagattttgttctatttcttatgtcgtgtcaaaataaaggagtataaaatgagtgcgaaagacaatgtaatgaggctttggaaagaaagaagacctgatataaaatcagtagctgaattagaaagaaaaatggatttaagtaacggaatcatcagcaaatgggaaacgaaaaagccttcaacggctagtgcacaaaaggttgctgatttttttaaagtaccattaagtgaagtcttagatgatgttacagatgaatctgtaacgctgaacaaaaatgatcaagaacttttagcaatgtttagaaaagaaaccgatggaatgtcaaatgaagaaaaacaagattttcaagattctttaggtattttgatgaacactgcaaagcaaattgttaaaagacgtagaaagagtgaaaaataatatgcctggatacgaatatagattaataccagaagattcatatgaaagtagcaatgatattgctaattctatagttgaagatactgctttaaaatacaatgtacctaaatcagaggtaaggtatccaatggttattaactatctttattcgataatcgggacatgcgatatatgtgcttatacacctaatttaattttcccttttgaaaataatggtcaaaatgctttaaatgattttaattatggattaactgctagaaatatttcatttacagcgcaatctattgatgaagtaagtactacttttgcaaatagagtctgcggctttaccctttttcccgctagtggaccaattatgtttttaaatgcaagtattaatacttggggaagaataatatttactattattcatgagctttcacatgcttatcaagcattagacgaccccacatataaaagttctgttgctttaataaatgcgcaaaagagccaaggaaatccttatcctgaagagcttcagcccattgaaacagaagctaatataattgcttcaaatgtttatgttccagaagattcattaaaaaaagaaattatgaataaatcatttaatcaaatgaaagacatttatggaatgagctcagcagcattacataacagacttaaaaactttttgcattatactattggaatgtcaattaatgctgctttggaatatacattagcatttagaaataataacacgataaaaatggatatttgtcgaagctattgtattcaaagtctgcataaccctgttgtgttttaaaacgtccacagtgacgttaaacctgaaagaaataaggagccaaaacaaatgactgataaaaaagaagacaataaagatggttctgttggttgtgcaataggatttattataataattgcggttttagtgggagggttcttatggataagacattctaatgagcaaagcaccgcaaatattgagagacaagaaagaattgaaagtcaaaaggctaaaaaaagcaatgcaattaaaaagcagaaagctaaccaaactaatgctttaattgttaaaaacattaaggctttccgttctaaaaatgatccagatactaattggtcaaaatatgtaagcaaagttactgttaattccaaagctaacttatctgtggaagttaatgatcgttttgttaatttatctgacaaggataagactacttgcatgcgtggtattaacaaagaagctacatgggatgcttatcattatggcttaattagtaagtctaaagttggcaatcgtttatgggcacaaatatttgacgatgacaataatgaaatgggacgttccacatttgatgtttatgataactataagtggaattaatctataaaacaaaaaagcccacctactgctggaacagtaagtgagcgcaactcaataaacttaataatacttataatgtaatagagtaacgataaaccgactggaatcggcttatttcgtctaccctattttagcaaaaataggagtaaaaataaaatggcatcaataagaaaacgtggcaaaacctggtatgtaagattttcaaagagagaaactcaatgggatccagaaaaacaaaagaatgtttctattttaaaacaaaaatcaaaaggcggtttcaaaaccaagtctgaagcacaacagtacggaattaaaatggaagccgcttctattgatggtgtagatgtagttaagaaccctgtgttcgctgactattttgaacactggtatcttacttttaaattcccgattatcagaaaatcaacgcaaaagagatatattaccaattatcattatcttgaaaaatattttggatcaacaaaaataaaagatatttcaagagctaaatatcaaagcttcttaaattggcttggtaaaaaccatgctcctgctacagttcgtaaaaccaatattatggttaaagcttgtgcaggaaatgcaatagaggatggtttaatcgttaagaattttaccaatcgcacaaccatcacaggaaatcaagacaatgtcagagccatagaataccttaatgaaggagaaatgaataagctggtacaattatgcttaacaaatttaactcctcgttatactagcaaatatttagttctagcggggttatttacaggcgcacgacttggagaactaacagctttaaaatggactgatattgattttaagaataaaattattgatattaataaaacctggaatcctaatttaaaaatactaggaccaactaaaaccgaaagttcagttcgaaagattaaagttaattctttcttattagataaattgaaacaattaaaaattaataattctgaatttatttttgctattcctagaactggattaccaccttctagttctgctgtaaatcaattcttaagaaaagccattaaggaaattggacttaacaaacctgattttcacttccatagtttaaggcatacccatgtttcatacttaatttctcaaggaattgatatagctgctatcagtaaacgcttaggacatgctaatatagcaatcactttatcaatctatgctcacttacttgatgaatataaggatcaacaagatgccaaaattattaattcactcaatcaagtttgtgcaacatttgtgcaacaccgtgaaaaattctatgatattgcaaaacattaaatcctataatatcaacgatttaaagcttataaatatttctaaaaacctatattttaattcaaccaaggctttaaagtctggtaaagttactcgtgcctaatagaccaagagcttgttagatcactgatcttgcaagcttatttttttacttattttaatgatttatataaaaaacggtaagaagaccattttattttgtcttcttaccgttttactttacttcataatattgtgatgcttatcgtcatcaggaatttcgtcggccattctttcatcaattggcgtgtatgcatactcagtaatcatttcacccaccttagttggcaagtccaaatcttgataagttacatttctagctaagccattgatagtagctacttccttcttcttctttttatcaaaaatgtgaacgtggttcttgtacatgtagtcttctacattttattttgcacggtcaagtcttgcttcgtagcgaccgttttcgaaaccagcaatatctttttcaaagtcaatatatttcatttgaattcccttgtttcttttctatagttctattttaacctataaatcatgaaaacgattaatatctttagaataaattgctgcaatcataccattttgcaagctaatcctgaattcattactattaggcaaaaattcatttgatgaaaaaacacgaggatagttcccagaatagtgcttcaactcatatcttgcaccaataatattaaaatcttcgattgcttttaaagctgcaaaaccaatataagaataattttttcttttttgaacaacatgcgtgcctgcattaaaaaagcaaattagattttgttggtcaatcaacgttacttttttcgcatataatctcatttcaggatttagcaacattaatagattgatcaaaaaatgatccaatcttccacctgtagcaccaaaaatcactaattcatccacatgataatcttcaaaagcaatctgcaacattagctcagaatcagtccaatccttgacaggattagaataccgaatgtcttgaacattactttctatttggcttaagtcattttcgtgtaaagaatcaaagtcacctactgccacatcaggtattattcccagttcttctaaaaacaaggcaccacgatcaaccccaataactaaatcagcttgagccagcttttcttcaatatcttcaggccacaattcagttggaccgcccaacaatgcatatgctttcattacttaataatcttttctaatttatgtacttgactgccaacatcaccattttcatacaagtatgaaccaacaacaaatatattagcgccagcattttcagctaatttaatagtctgatcattaataccgccgtcgacctcaatatcaaaatcagagccgacaatctctctaactgacttaattcgactaactgattcaggaagaaaactctgtccaccaaatcccggcttgaccgtcattactaatacttgtttcagtaatggcaaatacggttcaaccacttcaactggtgtatctggactaattgccaaagcagcatcaacgccattagaagctaaataatcgaaccaataatataacttaggcttgtccattgcttcatagtgtatttcgaccaaatctgctcctgcactaacaaaagctggtaccaacttatctggggcatcactcattaagtgaatttcagcatctgtcatcggaaattcacgcttgaaatctttgattagttgcggtccaaaagataaattaggcacaaaatgtccatccataatatcaatatgaaaacggctaattccggcctggactgcattttcaatatcatttttaagatcaatattatttgcgttcaaaattgagggtgcaatcatcatcagctattacctctattttaaatattccggtatgcgaccttcgctaatctcagtccgcatagccaaataatcctcatatctactttccagaatttctctggcttcaagtaacttctttacttcacagcctggctcctgcaaatgctgacatccgcggaacttacagtgaatacttgcctttttaaactcaacaaagtaattacataactcattcaacttgattggtgtcaaatcaattgacgaaaaacctggcgtatctgctaaaaagcccgcgcctaacttaaaaagttcgacctttctagtagtatgtttcccacgattcaagctagttgatatcgcaccagtcgcttgattagcatctttttttaaatggttaagcaaagttgacttaccagcacctgactgtcctgctaaagtccaaatttgatttttttcgatcattttaggaatctgaatttgcatttcatgataatcagtgaaaacaagataacctattttttgataatatgctaaagcttgcttgattgtgtttaactttgcttctgatagcaaatctgctttagacaagtaaattgttacaccaactttttgccaagaaaagaaagtcaaaaaacgatctaacagctctacagaaaaatccggttctactgcagaaattactaacaaaacatgacttacattagcaactgctggtcgcccaattcgattaatccgcggcaagattttcaccagatagctcattcctttatcatctatctgaatttccacatgatcgccaactgccggtttttgctttttttgacgaaaaacgccgcgagcacgcgttctcacgatacccgcagcggtttctacatcataataaccagcaatcaaaccaacgacggttccttgcgctagtttcatttatttagtcaccttttcattcaaaactgtatcgccattgcgaacaacctttaattgtccactaccttctctaatgttaaatggaatcgagaaactcatatcatgcttaatatacaagtcacgataaatattgttcaaggaatgatcatcatccttaatatagatctggacatgatcacccttgccattaacggattctgactcagagttattgcttcctttatcattatcaggcttctcactcttagaaagatcatcaccaacatagttaacggtaaaggtcttagttacagtagtttccttgtcttcctttggacctttcgagatcttgatggtaacagttgaaccacgctcaaccttagtacccggacctggctccatcgaaattactaagcccttctcaacatcatcagaatattcttgattgatttgtaaagtcaggccatgttctttggcatagtcttgagcactcttcaaagaataattacttaagtctttcaaggtaaccatatttgaatgtgatctagcctgcttgccacgtgaaactatcaacgtaattgtagtctgcgtcggcttaacctctacacctgcagcaatgctttgagaaataacttgattttcgtcaactttattagaatattggtcctctctaactacattaaagcccatattttctaatttttctgccgcttcggcatagttcttcccaaccatatcaggaactttaaccatgctagaaccgctggaaacaattaaatcaacgctctttccccgctctagactattgcctgcagttggttttgtcgcaataacccggcctttttttatatcatctgattgtcgcctaataatttttccaacctgtaagcctgctgcttcaagtttactctcagctgctttttctgcaatattagttacatcaggaatattaacatcctgtcgtttatttccagtaccacttaaagcgaaaatcatcataaaaatgattaaacccgcggcaataattgagatcagccaccaccatttgtgacttttgacattctgtaaaaaagtctttttctttactagcttgcttgattctactgattcggtttttgctggctccaccacttctttttcttccttttgtggcttaaatccaggcaatacaattgttttatcatcgttattaccatgatatggtacaaaaaccggttcatctgcccgttcaggatccaagctactatccaaatctgctttcatttcctgagctgtagcatatctatctcgtggatctttcgcggttgcctttaaaacaacattttccagcgcctgtggtacacttgaatctttcttgcgaattgaaggaattggttcttgcgcatgcttcagtgcaattgccactggtgtatcaccgttaaacggaacagttcctgtgatcaattcatataaaattattcccaaggaatagatgtcagattgtttagtaaccattccgccacgcgtttgctcaggagacatataatgaactgaacccattactgaattagtttgtgtaatcgagctttgattcaaagcaacggcaattccgaaatcagctattttaatattgccgcgcttatccatcaaaatattctgtggttttagatcacgatgaataacattgtgcttatgagctaatgcaactgcactcaatatctgatccataattcgaataatttcatttaaatccaaaggtgaatttttttgaatatattcttttagattaggaccatcaacatactccattaccatgtatggcaaaccatgatcggtacctacatcaagtacagaaacaatattaggatgacttaattcacttgtagctaatgcctctctttgaaaacgagcttgggtttgcggttcattctgcaaatcaaggcgtaaaattttaactgccaccttacgttgcaggataatatcttccgctagatagacattggccattccgccttcacctaaggtatcgatgatgcggtaacgttccccaagcagataacctttatcgatcactgctctcgtcctccttgttccaaattaagcagacagtaatattatcaccaccacctaatcgattggcctcactaatcaatttattacaacgttctcttaagctaagctccttagttgccaaaatttgttggatttgtggatcgctaagtgaattggttaggccatcagtacagagcaaaataatgtcgttttcccccatcttgatctcatcaaattcaggatcaatcgtacttgagacgcctaatgcttgcgtaataatatttttctggggatggtgtttagcttgttctttagtaatctgacccatcttaactaattcgttaaccaaagaatgatcttcagttaattggacaaatttaccttcagaataactataagcccgagaatcacctaaatgagcaattaaggcatttttatcaaatgcaaacgccaatacaatcgttgtccccattccatttaagtcaggaaacttatcagcagtctttaaaattgtttcattttcagaatttaattgcacatcaagccatttatgagcgagattagcatctgcaaagtcagtcatactaaaattatgtcctaaatgggtgactgccattgttgaagcaacgtcaccaccttgatggccgcccataccatcacagacaattgctaagacaattcccttttgatttttaaaaacttttacaaaatcttgattgcttttccgtaccttaccaatactcgaagcgtatgctgtttcaatcaaaaatctaacctcgtaacttaaatttagcaatgaaaaatccatcattgccatctagatcaggcattattttcaacatccctgtctttgattcaagtttagttaacttaaatggaactagttcaaagtcaggatgtgcttgcaaaaacttcttaactacctcttcattttcttccattgaaattgagcaagttgaataaaccaactcgccattcttttttaagagtgaacttactgcagttaagattgccaattgaattttttgtaaattttgtaagtcctgttgtctcttagtatagcgaatttcaggcttacgacgcaataatccaagcccagaacaaggggcatcgactaaaatttttgtaaattcacctgccgcaaaaatctctgtagccttacgtgcatcacatgccttagtctttaccttatttgcaacgtgcattctctgggcattatctcgtactaaacgtaattttttatcatgaatatctaaggcagtcacatcaccattaacaatgctttcggcaatttgcacggttttcccaccgggagcagaacaagcatcaagcacatgctcatcttgttcaaagtcaaaagcttctacgactaaactggcagcttcatcttgaattgttaacttgccttcttcaaacaaatcactttcgctaatgccaccgtgactcaaaatcacatcatcgcttgataacttagaccattgtggttgatagttatcccgctctaactgggcaaaaacttgctctttatctgccaactttgaaatacgtacactgtttttagctggctcattaatactgtttaaaactgattttgccttgtctaggccccagttatcaattaaatattgaactaaccattcaggtacgctctctttgacacttaaatatttaactggattattttcagctggtaaaatcaccccgcgcctagtaaacgaacgcaaaatcccatttaccaaccgaaagccagctgaatgtcgcttgccatattgcttagcaagtttattagcctcatcaagtacagcacgatcaggcactttatccaaaaaaatcaactggtaaagtgacattaacaataatggcttaatatatttttcggtcagttttgtcctaactaagccttttaactgatattctaaaaacaatcgatactgaatcgtgccataaacaatattagtagctaaattttggtctgcaattgacaagttagagtgctttaagctgttattcaaactaatattagaataggagccttgatctaagaccttgatcaatgtctctaagctgactgcacgtgcactcttatcgatcgacaatttcttcacctgggacaaacttactaccttgaccatttaaaaagctcttgatgtccattctctttttgccacttggttgaacttcaagtaagttaagtactgaattatcagcaaaactaatggcaaaacgtcctttgttagcaacaacagagccggcatttaaacttgatgaatcagatgcaatttctgccttccagatcttgaaacgtttgccttcaatcatcaaataagcaccaggatctggattcaaagcacgaatcatatcgttggcctcttctgctgtcatatcaacattaagcttttcttgttctttagtgatgttaggtgaaaagacgaccttttctggatcctgtggaacctttttaattgagccatcaataattgctggtaaagtcttaagcaataagtcccgcccaacaattgataatttactaaataaagtgccagcgttatcatcaggctcaatcttaattgcttcttgagcataaatatcaccagcatccatcttcttaaccatttccataatggtaattccagtttctttatcaccgttaattagtgaatattgaattggtgcaccgccacggtatttaggcaaaagtgagccgtgaacattaactgccgcaattttaaccgaattcaaaaacttagttggtaaaaattgcccatatgctgcagttacaatcaaatctgcatgcatatcaattaatttctgcatttcgtctgatccagacaacttaaccggttgaaagattggcaaatcatgcttttctgctgcgatcttggctggtgacttagtaattttctgcttacgtcctacctttttatcaggttgagtgaccacggctttaatctcatagccttcatcaattaacccttcaagtactggaactgaaaatttcggtgttcccataaatattattgatgtcattaaagcatccccttacataattctctctggttcattatcaataaaaatacttaaaccatatttcttagcttcctgcgcggaatcttgaacatggtgtaataattcatttaaatttggttcttttttatattttaccagtatttgataataatatttattttttacacgagaaattgcacttggcgttggtcccaaaataatcgttggctcatgcaagtgctcattcaaatacctcttaatcctaaaagcctcacgagctgcattctgttcttttttagcagcaatggaaatcagcacggtataaaaatatggtggatagttaccagcatgccgcatattcatctcatagccataaaatcgttcgtagtcctgagtttgagctagttgaatagcataatgctctggattataagtttgaattaagacttccccttccttatcagcacgacctgcacggccagctacttgagttaataattcaaaagtcttttcagaagcattatagtcagaaagccataatcctgtatcggcattgattactccaactaaagttacattagggaaatctaatcctttagcaatcatttgcgtacctaacaaaatatcagcttcatgagcaccaaaggcatctagaattttcttatagctaccctttcttctagttgtatcaacgtccatccgcaagattcgtgcaccaggcagaagctcttctaattcttcttgtaccttctgtgtacctgcacctaaaaaacgaatttgcgagcttgggcaattaggacaacgtgtgggtactggctcagtatgaccacaatagtgacattgcatcctgttagtatccttatgcaaatttaaagaaacatcacaattaggacattttaatacaaaaccacattcacggcaaagcataaaattagcaaaaccacgtcgattgagcattaaaataacctgctctttttttgccaaacgcttttttattgcatctactagctcaacagataaatcaaattgaccaccagcaaactgcacgtgctttagatcaatcaaattaactttaggcaatttcttttgattagccctttcagttaaccgtaaaagatgatagacatttttttgggcgcgtgcacggctactcaacgatggtgttgcacttcctaaaaccaacggacaattatgaaatttactacgccaaatagccacatcacgtgcattataacgtggatcggtttcttgcttatatgaagactcatgttcctcatcgatcacgattaaaccaatattatctagtggagcaaaaactgcactccgagcgccaacgaccaccttagtctcgccacgacgaattcggcgccactcatcatatttttctccctcagatagggcactatgtaaaacggctacctcttgaccaaaacgtgccttaacctgacgaaccatttgcggcgtcaaggaaatttctggcaccagcattaatgcatttcgcccctgtttaagagccttgctaatagcgtgtaaatacacttcagtcttcccgctaccagtaatcccttccaacaaaaaagtctcagcctggcgctgttcaattgcttgggtgatctggttcaaagcaccttgctgctcaccatttaaggtaaccgctgttttatgttctccgtcatcaaatccggataacggatcgcgataaacctcaacactttttttattcaaccaacctttggtaatcgcagaattcaaactcgccgccgtcaatccaagctgtttttctagctggctttggcttttgggataatccgctgcattatcaatgatatccatcaataactttttttgctttaccgcattttgacgtaaagtattgtaaattttgggatattcctctttttttaatgctagttcatattgattttcttttttcttcttggctcgattttctaccacatactcaatctttgcttgatcatcttgcaataatttgcggaattgcttaatctccgccagatccgtaattttatttaaatcaattggatcaccctgaaacagcggcattttggcagctctatcattagctggcactagcaatttgcgataatttgctcgcattacccaaggtagcatcgcttgtaaaattttaattcggtaagaaaaaatattttttgctaaatcagcagataactttaccaactctggcgtaagcggtggcatctcatctaccacaactagcaaatccttaagtttacctttaaattcactttgatcagtgatccccaccacaaaaccttgcactttacgaggaccaaacggaacaactactcttgatccaatcgcaatatccttttctaattctgttggaatatgatattcaaaaatacggtctgtttgccgtgcagctacatcaacaataacctgagcaatcatttaatcacctgtaaaaaagaccttcaccccaaaggatgaaggtcaataaattaatcttcgaggttaacctcggcatgagctgggtcaacagtaactttaccagcagcaatttcttcaagtgccttaccaacagccttatcacacttaaaatgttccaaagttggtggatcaccagcttcaagttcatgtgctctcttagcggcaagaacagataatgaatagcgtgaatcaacacgtgacaataatttatcaattgatgggtaagtaattctcataataattaatcctccttgaccatcttacgatagtcatcaattacacgtttaacactgacatgttctgcatcgacgatcgctttaatatgatcaactgcattagctactgtatcattaactactgcataatcatagtcttccatctccaaaatttcattgcgcgcttgcttaattcgaccacgaattacatcttctgactcggtgccacggtgttccaaacgcaaatgtaacgtatgtagatctggtggggttaaaaagataaacacgccatcgggcatcttttcacgtactttttgtgccccattaacatcaatctcaagtaaaacatctttgccatcatgaagcatcttcttcactggtgcaagaggtgtaccataatagtgaccgacatatttattatattctaacaactcaccatttttaatagcctcttgaaagcgatcttcactaacaaaaaaataatcttggccattaacctcacctggtcgcggttgacgcgtagtcattgaaactgaatattcaaatggaaagactttgttttcaacaatcgcgcttttaacagttcctttaccaacgccggaaggaccagaaagcacaagtaataaacctttatctgccatgctgaactcctcttaacttgtaatatatctagtttgcactaaaattgtttctttttcaagttttctctttgcatacaaaaaaacagacaaaatcgtctgctcctttactaaattattttctcgaatgtctcacacactacttcagtttcatctgtgaactctcgtcccagttcttgacattcgcgcgcaaaaaatttctcgtgtactttacgccaagattcatatgagcgatcgccctcgccttctaaataggcatgctcagctgagacatttttaaatggcataatctcaacagtcttattttgaatcacacaaactggttcatttcgtccatttaaaacaattgcgtacatccctacaaccggtacatcttcttgcgcagaatacaggctagtcgttgccgtcttaattccacttttgaccaaatcactaagaatatctgcatcccggctattagctccaaaagcaaaagcaccttctaatgctgtaggacttacttgatgttctacacaaaaatcacgccaaaatttactaatactagtcatctttaatactcttaatcaaatctgcagcattcttctttgctgcatcggttacatcttgtccagccatcatctgtgcaatcgctgtaatggtttcttccttgctaagtgggcctatttgagtaaaggttgaaccatcttttacttgcttagctaccaagtagcgttgatcacccgcggcagccacttgtggtgagtgcgtaattgcaattacctgcttgttgcgaccgattgagtgcatctttttcccgatagcagccgatactcggccagaaactcccgtatcaatttcgtcaaaaatcatggtacccactggttcaactcggctgaagattgccttcaaagctaagatcaatcttgattgttcaccaccagaaacaattttaactaatggcattaaatcttcacctggattaggtgcaattaagaaaacaatcgcatcagttcccttatcggtaaatgtctttgtttcatcaaaattaatagaaaagcgagctttttccatgtagagatcagctaactcttgcttaatctgctcttccagagaatgagccactttttcgcgtattaaatgcagatctctagcttcttgggtcattctttcttcaatcttggcaacttctgcttgcaatttttcctcatcaaggccgcctgtttcaaattgactgagttctttttgtactttttgataaaaagcaaacacatcagccaaggttgggccatacttctttttcaatgaattcaaggtatccaagcggttagtcacgtattgaaaacgttcctcatcgaagtccattgcatccattaagttcgataattcactgcgggcgtcatttaaagcataaactccatcatcaactgtcttagcaaaatccttaaattttgaaccaaattcagttaaatcagtcgcagcattttgcgcatctccaagtaaagttgcaattccatgctcatcgtcatcatacaattgcatgaagtaattcgccgtatccgcaattttttgataattatttagttcgttatattcttcctcaagtttctcatcttcttgtggatcctcaaggtcggctgcttccaattcattattctgaaactgcagaatatcttgcttctgagctaattcttgggcatcttgacgcaggtgcagcaattgactggttagcttttgccattgagcataatcagtttgataagtggctaaatctgccttaaaagaagcaggggcataattatcaactaggtcaatctgccggtcctgatccatcaaaatttgctgatcatgctggccgtgaatatcaaccaaatagctaccaatctcgcgcaaaacattaatcgtcgtcaattgcccgttaatccggactacatttctgcccttgacagctaattcacgactaatcaccagctgatcgtcatcgtgcggcaaaccatattgatcacacaattccgcgatcttttctttttgatcatccaattcaaacaagccagtaataatcgccttggactcacccgaacgaatcatttctttttgaccgcgaccacccatcagtaatgaaacagcatcaataataattgacttaccagcaccagtttcaccgatgattaccgtcattttttcttgaaaacgaacctttaagcttttaataattgcaaagtttttgatatctagctcaactagcatagcttcactcctatagaccacttacggcgcgctcaaccacttcagctgggctcccttgccataagttgcggccaccatttgcttcgtctttttgtaaatgaatcaagaattcaatattgcctttgccacctttaattggtgaataatcaacgcctaaaacattgaagccgatctccaatgccttttgcatggtgtgctcgattaccgccttgtgcacttcatgatcatgaacaataccgtgtttaccgacattctcagggccagcttcaaattgtggtttaatcaaacaaacggcatcacattgattcttcaaaattgcatacatcggtgccatgatcaaatctaacgagataaaggacacatcggtcattgcaaaatctggcagtccttgatcaaaatcttccggcttcgaatagcggaaattctgcttttccatcaccactacacgcgggtcgtcccgcaattgccaagctaactggttgtagccaacatccaaggcatagaccatctgagcaccgttttgtaaagcaacatcagtaaaaccgccagttgatgcaccaatatctaaacaaattttatttgttaaatcaatgtcaaagaccttaagagctttttccagtttaaagccgccacgcgaaacatatttcttaccatcatctttcacgtaaaacttttccccttcaggaaacttagtcccgctcttatcaattcgttgatgattgtgatcagaaaccagccccgccataatcgctctttgggcagctgaacgagaatgaaaaattccttgttctgctaataaaatatctgctctttgttttgccatttataacaccttttgataaagatctaaaaagccagttagcacttcgccatttagtccatgcaaatcatcttgtgcttgcttaattaagtcagttagttctttgcgactttgatcaattcctaacaaagttaaagtattattctttccttcagcttcatccttgtgcgtagctttaccagcttctgcactagtttcaacgacatcaaccaagtcgtcatagatttggtatgaacgaccaaaaattttggcaaaatcgactaattttacctgttcaatatcactagctcctgcataaactgcagccatctcaacgctagcctgaattaagcaaccggtcttcagccattccatcttattgataaacttggcatcacccgcaacactagcattgttagttgaatcaatatccaaatattgaccgccaaccatcccattagggccaactgctttggtaattaaatctaccaatttcgccgacttactgccttccgcaatccattgaattcccatcggcaagagcgcatccccagctaaaattgcctcagcctcgccccattttttgtggctagtcagcttaccgcgccgatagtcatcgttatccatggcaggcaggtcatcatgaatcaaggaataagtgtgaatcagttcaatcccgcaggcaatcctaatttcaggttcttcaatctttctgcctaaagcatttaacgtagctaaaaacaataacggacgcaagcgcttgccgccacccatcactgagtaggccataatctgactgatcttttgatcttcaacctcactagccaaatgcttagccagataatcatcaattactggggtccattcatctttaaaataagtaaatgctgtcatatttattcctctggtgctgatgcgttatttggatctaatttgtgttctgtgccatcactatcaatcaacttagccacagtttcttcagcactgttaagcttcttttctaaatcacggctaatctttacgccctcctgaaattcttttagggcatcttccaacggaacatttccgttttccaaattttgcacgatttgttccaaattagttaattgttcttcaaaattatttttcttcactgccattttgttcttcctttacctttgtaaccactgcttcaacttgtccatctttaaaatgcaatcgcaaatgatcatccttttgaacttgtttcacagaactaatggttttcccttgttcatcagttgaataaacaaaacctcgctctagcgtcttcaaagggctatagtcatccaactgctgcattacttgggtaaaactattgcgtttatttttcaaatagtgctgcatattatcaatcagtcgttgctgtaaaaaatgctcttgttgctgcatctggccgattctcttatctggactaacgctaaacaaacgctgcttcaacagttgataaccttggacagaatgggtcaaccgattttgcatactattttgcagcctttgttttaattgatcaacttgttgaatctgctgatcatacagtctagtcggctcgcgcaggatgacagaattctgcacccgacttaagcgctcacgtttcgaacgaataatattttgcatgctagctaccaactggctggttaattgcttaatatgcgcaatttcgtccaatgtattaggcgtagcatattctgctgcagcagttggtgttgctgcacgcgcatcggccaccaaatcacacaaggtagtatccgtttcatgaccaactgaagaaattactggcatctgcattgcgtaaacttgccgcacaacctcttcttcattgaatggccacaaatcttctagtgagccaccaccacgaccgatgatcatgacatcatacttgtcgccttgagcggcaatctggcgcattgctctcactaatgaatccgctgcagtatcaccctggacttgcgcaggatacaaatcaatctcagcatgcgggaaacgccgattagctgtaaccataatatcgtgaataactgccccagaagcactagtaactactgcaattcgatcaggaaaatgaggcaacttcttcttatgctctggatcaaacagaccttctttggctaatttggcctgcaactgcttcaattgctcatataaggcacctaatcctgccggttccatttgttcagcataaaactgatacgagccctgtgggccatacacgctgacatacccaaccacataaaccttcattccttcttctggtttaaatttcaccttatcaaagaaggaacggaacatcaccacattaattttagatttttcatcttttagtgaaaaatactggtgcgaattacgccgataacggaagttggacaattcaccttgtaagaagaccttatgcaggtaaggatcattcttaaatttttgcgtaatataataatttaaatcagtaaccgttaaatatttattctcggccattttgtctcctagtcaatttaacaactgcttccattaagaattgtactgtaagaggacctacaccgccaggaaccggagtaatatagctggctttttctttaacattatcaaagtcaacgtctccgactaatttgccattaacatgattcatgcccacatcaacgaccactgccccatctttaaccatatctgcagttaccaaaaatgcttgtcctgttgctgaaactactatatcggcttgtcgtgtaatttcagccagatttttagtatacaaatggcaaacagtaacagtagcattttcctctaacattaatgccgctactggtttgcctacgatattgcttcgaccaataactacaactctcttaccagccagcgtaatttgataatgtttcaataaagcaataatgccttctgcagtagccggttcaacaaagtgattttccatccaaagttgaccaatattcgcaggcgttaaggcgtcgacatccttattagggtcaatcctttttaacaaggcatctgcatcaatctgttcaggtgctggcaactgtaccatcaagccgttaatctcaggatcagcatttagcttatcaattaatgctaaaacttcttcctgtttagtatcagcgggcatttgataaatatcttggataattcccatcttttcagcccgccgcttttttgttcgaacataaatcttgctagcaggatcatccccaatatttattacgcaaaaatgtggcgttattccctcttcttttaatttcttaactttttctttaagattttgccctaattcatttgcaaatgctttaccatcaagaatctttcccataaagcccgttctccttttgtaaaaaaataactggcaaaactgccggctattcatcgctatttaacaaagtttgctaacattccattaataaatggcttttctttaggctcagcaaattcgtcacataaatttaaagcttcgttaactgctgccttagcatcaatttcatcgctatgcttgatttcaaataaagcaacttccatgatggctaccacagtttgactcacacgttcaagacgccagccctttttcaaatgactagttagttcagactgtaaatttttgcgatcttctagtacgccttcgattaacttcttagaataggcagaaagctgttttaaattaagcgttgcaacgacttttgcttcaacttcttcggcagttaaatctggctcctgattagccaaataaacggcttgcatagcaacttttcgactttcgtgttggttcattatttttcttcttcgtcctccggaaacagctctgatgtagtctggtcagtattttcatcttctgggaaaactaaaccgacaacatgaacgttgattgccttcagctcaagatcagtcatttgcaataattgtgccttcaacttcttttgcaacgtcattgcaaccttaggaacgttaacgccgctttcaagataaacataaatatcagcaattagcttattatcgtcatcaacactaatatttacgcccttaccatgatcttcacgaccgaaaacccagtttaagcctgatttcaaactgccgcgcattccggcaacaccatcaactttttctgcagcaatacccaaaataacttctagaacacttggatcaattttaatttgctcgctgttttcttcaccacttaaaagaatttttgaactatctgccattttgttacctcaaataaactacttatttgcacgtgatacgtaagtaccatcagcagtgttaatagttaaaacgtcaccttcgttaatgaagaatggtacgttaactactaaaccagtttccatagtagctggcttaccaccacctgatgaagtatcacccttgatgttaggttcagtcttagcaaccttcaaatcaaccgtattaggcaattggatacctaaagtttcaccttcgtgcataactacgttaacaatcatgttttccaataagtaattagcttcatcgccaatttgttcatttggaattgctaattgatcgtaagtagaagtatccatgaatacataacttgagccatcattgtacaagtattgcattgacttagtttgaatgtctgcagtttcaaccttagcagttgaacggaaagtatattcttgtacagcaccagttctcaaactcttaagctttgaacgtacaaaggcactacccttacctggttttacgtgttggaattcaacaatgcgccataaatcgttgttgtattgaatagtcaagccattcttgaattcgtttactgaaatcattgtcatattaagtccctcatttctacaattattatcttaccaatcttgaagcgtttttaccataaatacgataaattaaatagctattatagggaaatcaattcatcctttggcaaagtggataaagtttcaggcgtttgatcatggaccaaaatatcgtcttcgattctaacaccgcccttgtctggcaagtagattcctggttctacggtatgaaccatattattgaccaatttagtagttctaaaaggtaaagctggttgacacaattcgtgaatttcaagaccaatgccgtgaccgatcccgtgtccaaaatactgaccgtaaccttgttctgtaatataatcacgtgctgctttatcaacatcatatccagtattacctgcaactgccgcggcaatgccacggcgttgtgcttcatgtacaatatcatagattttatgcatttcagcatcaacttcacctaatgaaacagttctagtaatatctgccgcataaccgtgataaaaactaccaaagtcaatgacaatcatatcgccttcggacaattctttgtcactagcaacgccatgagcccaagccgaacgcacaccggaagctacaattgtatcgaaatcagggccatcgccgccattaactttaaataggtagtccaatttagcaccaattgcacgttctttaacgccaggcttaatcatcggcaaaatacctttaaagctttccattgaaatatcaattgctttgcgcaatgccgcaatttcaagatcatctttaatattacgtactcgttcaaccaattcttcaaccatcacaaattcaagttctggatttagttgcttaagtttttcatattcactcgctgaaacgaattcaccttcaactaagaccctcttgacgtccatttttttcaaggccttagtaagttcttcataatcactagaatgtttcattacaacatccatttcgccaggtgcttgtgctttaatctgtccagcaaaacgagaatctgataaaagtactcgttcgccactagcagtcaaaattaattgtgcttcttcccctgtaaaattggttagatatcgataattagcttgattaaaaataatcaatgcatctgcatttgcttctttaattaaatcagttacatgctcaattcgctggttaattaaggataataattcttgcctattttccatctcagagaccctctttttgtatgatattggtttaattatacatgtttctgggcggaaaaagccataaaaaaagacgggtggcttatgctactcgccttttcatgttaatctctgaattacttagcttcttcagctgggtatacagaaacttgcttcttgtacttgccaagacgttcaaatttaacaacgccgttaacaagtgcaaataaagtgtcgtctccaccttgacctacgttcttgcctgggtgaaccttagtaccacgttgacggtaaataatagtacctgcgtggatagtttgaccgtcaccagccttggcgcctaaacgacgaccagctgagttacgaccgttggcagtagaaccaccacccttgtggtgagcgtataatttcatacctaaaatgttcatattcatttcacctctgaattaagcttcaatcttttcaactgtaaccttagtgtaaggttgacggtgaccatacttgctgtgtgagtgcttcttaggcttgtacttgaaagttacaactttcttttccttgccttgcttttcaactttagcagttaccttagcaccatctactaatggagtaccaaccttaacgtcgtcgccattagcaacaaggataacttcgtcaaaagttactgagctaccttcttcagcatcaagcttttctacaaatacgctatcgccttctgcaactttgtattgcttaccaccggtcttaataattgcgtacatttgtacacctccgaaaaaaatacttagactcgccgaactggggtgcttcttacataagaagacttctaacctcaagccgtgcggttgcagatgtggaggtctccacaaatacaactcttatatcatacaacgcttttagactaagatcaattatttttttacattcgccattgaccgccatgcacttttgcaacattttcggtaatgataaacgcatcctgatcgatctcatgtactttagaaataagtggcccatattcacgtggatcaactacgattaataattgacgcttgctttcgtcgctatatccacctataacatcataaatcgtcaggccttgataatcttctttaagcatatcttgaattcggtctaaatctgaattactcataattctgacttgatactttttatcaaaaccggtctccgcgtagcgcatcgtaatggcagttaccacttgagaaaatgctgctaagaagaaagcattccaaccatcgacaaaaatgttcaagaaaataattaccatatcaatgcataaaagcgtagttgcaggatttaaataaaaatatttcttcagaatcatcggcggaattgttgtcccaccacttgaggcattaacgcgataaagtagcgaaactccaagtcccattaatgcaccaccataaattacggctagtaggtcattattcactgctttaaagctaggcgtaacttccatcaaaactggtaagagcaaactacctaatgcaatattttgggtagtctttttgcctaaaaagattgccgccaaaatcagcatcaagccattcactacaaatactgtaattgatcgattaatcccccagaccgcatcgactagaatagaaatacccgttgagccaccagctgcaatattaatcggtccataaaaaagattgattgatattgcgattatttcaagtcctgctaaaaataccaaccatctcatccaggaacgttgtttaatgtttttcattattaagcgtcctttcttttagttagtactattttaacgaaaaatcatctgttagctcaagcaaacaaaataatgttaacaaattatttatttttaacttctttataatcgattgattgcgttccttcataagcaggtaaaccattttcagctcgatataatgctcgctcaaaagagcggtagcctttagatgaagaaacggcaaatttaacaccatactttgaagcgaattcctgaatattccaagtagcatcatgagcagcataagctgtcatcaagattacaatatctaagtctttgatttgccgttccattaccttcttcttgccttcaaaagcatctattggaattgggatcccattatagcgcgaaacaatcccttctaatattccttcattttgattatcaccaatcgcaattcccacccgctgatagtgcaaattcatgtcgagtttagttaactcttctgtttcttctttctttgacttatttttcttttgatacgacagatctgatttcttaggcggatcaacttgataaatccaacgaatctgtactgcctcagcaggatttttcttaatgcgaacatcacccgtataccaagctagatctacaattgaaccatcttcaacatgaatattttcaccttgataataacttgaatcaaccggaatcgtgatatccttaccgcgaattctcaacttttcgcccttaatatttctagtgatagctaattgattggccttgccgcggaccacagcataccggaattcttcgattgggtcataatcacgcatgcgcaatttgcgataacccaccacgcgcaagacttctgcttcataatttggattatctcgattttcaatagcttcaactatgtcaccgctctttaaattcaaagagtgaatttgtgattctttaatacggtaaacaatttgaccactatcattaatcaaattacagcctgataaagcccgaataacagtatagcggcgtcctttacgataatcgcgcttaggttgctctttgggcttcattgcttcttcaaaaattttcttgttaacagcttctttagttgtcttagatttttgaattgcctgatccaatttacccaaaacattgccatagcgcttgccaacgcctggaacaaacgtcaacttgtgtaaagcatcaagtgaactctttttagctttttcatcacctggagtctcaattaaggctgtcagcccaatcaataattgcttaatttgctttaaatctgcatttctttgtgcaattgattgtgtatttgcaattttattcttaggttgagttactgatttagtctcagatttttcagctgtattatcttcggccatatttaggatagctttaatcgcacttaaactattttcgagacttttatcatcagcctcagttttatttaaaattattttgatattatttcgataatcatacattattctcaccacttttattgtataacttactaatagtaacgaacataattatactgatttttatgaagtagtgttaattgattgatcgttttagtgattaaatttttttacgcaaaaagcagacaatctttatattgcctgcttcctaatttttctatttatcgagttctaagccaattgaaccaattagcgaaattttcacctgctgtaacacgatgaaccaatacaatacctactgcttttaccggctgactttgcgcagcagcaattggaaatgcagtagagagagcaacagtcagtgcagttgcagaaattgcaattttcttttttaaattcatttcaaatcctcctcgtaaatatctagacatcaacatcattatattacgtgggattctaaataaataattcatttatgcacacatagctttaaggctctaatacaagtttatatatttaactatataaaaaggcgactcacaatcgagtcgccttttactacaatttctaattattaagctctccactcgccgccttggccataagtatgcttacctaattcgttgataattacatgaatgtgttccttaggcgcaccagtattcttgtgcactgcttcagtaacatccttcattaagttagtaatctgctcatctgagcgacctttaattaattcaatatgtacaaatggcataatttagccctccttttttagtttaattatagtataaaaatttctcactaaaaagcaccaccgccgctgccaccaccaaagccgccagacgatccacctgaaaatccacctgagcttccggaaactgaagataaaccagtagacacgcctgaagagaagctacgttcaaaactatgctcaaaactgtcactactgctactatagaatccactataaaacagaactggtgcagcatctaattcatctgcaaattcaatcttaagctgcttcaatacctttttggatagaccaaacgctacagcatacggcataatgtcttcccataaaatcagatcaccgacgtctttcatcttgaattgaccaatatcgtctagcattttcttaaagcagcgaacttgatctgtctcaagtgcacctttttgggtataaatacttaaacgagaattgcccactatgaatgcagcaacttctaagacgatcatcatgattccaattattatcacaaaactgggtatattatttgccatcattaagctaattacccagatcgcaaagctagcaatcattcccatgagcatccccgttcggaagttgctacgctgctttttatattttttatcaagcaagtccttatcctcaacttgcttatattgcccgtcacaccatttatcaaaacgcctacccaattttttagaagtataatcccgcaaatctttcgttgtaaatgacttaccatcaccaactttgttaaaaataaaatctaataggtcatcagtcaaaacactatcatctactaaagtaattcgataattagtccgctttaaatgtttagtttgatatttttcgatcttaattttatttttaccggctaattgcatcaaataagctgtaaatgctttaacatttggtttatcagcttcatccaaaatttgcgcagcagtaggtgatatatctggaatttcataattatgtactaaatcgcgctctatttttggcttaaccccaacttttttaataaaaaagcctctaattatcaccacaaaaccgacaagtactgaaatgatcatcaatcctatactaagcatctgcttacgctgacgcttctgattagcttcttttgctaatgctgcttcttgtttttcaattgctcttttcttattttctttaacaatattctgattagcactagttaccgtagttggaaaaatcgcatgtacttcgacaccactatctcctgcaacatcatcagcagtcataataattttgccctcttttggcaaaacctgagtgtaaccacttagtggcccatgagcccaagcttttagccccttaactgccccaggaaaaatcacttcagcacgcacatgatctaagtcagtatcccaaccattaccaactattttaaagttcagctcagctgtatcaagataattagtaattgcccggtgaattagataagaatactcaactttaaccttatcattttccttaattcgatgataaaccttaaaattataagaattgccctgcttttgcaatttatacgtattatttttgcccgttgttgcggcctttatattttgtccatcgaccttaacctgaatgttgctcaacttctgttttacagccagattttgcttataataaaggccacgagcatcactatcaaatgaatacttaattgttcgatacattgtcagtgaaccatctttattaactcttgctatggctctaacattatcaatatcataatcaacatcagctctaacgctttgaccccaaatagcaaaaacgctcaataggcttaataaagccaataaaccaaggtatttcttcttcattatttatttcccatttttctgcaaaaatttatcaattaaagtatctgctcgactatgatatttacctttaaaatcatgacctgcacccttaaataagtataatttcgagtgcttaaattttttattagccataattgaataagaatctggaataatcatgtcacttgtaccatgcattattaaaactggaccatgatacttagttgcttcttttaacaagttatacttgaacaagttttcaaaataggccttaccaattgtgaagccaaataggttgagcttgtctggcacttgtttttctgatttaaaagccgctttcgcataatcagtgatcgaaaaggcagggtaaagcaaaatcaatgactttacttcttgcggatatttacttgcgagcattgcggcaactgctccaccttgactctcgcctagcaaagacacttgtttacggtcaacatcagtcctatttttaattgtatttaataccagctgtagattcttttcttctgtaaaaattgacatctttaattgatctacaccactactttgaccattcttagctccaccaggaaaatcaaaagtataggcaacatagccacaactagctaaatatttagcataactggttagatcacggtaatttcctgccaatccgtgagccaaaattactgctttcttcttaccagctaaaccctgtggtagatatatatgaccataaatatcaacgccatcttgttgaattcgccaaacttggtctatcacttgatacttagcctgtttttccttagattgctgtttatcgactttaaccgttttaactgacgacttagccttcttaggcgtagtactttttatagtacaacccgttaaagtcagtagcatcaatattattgctataaatctttttttcaagtttatttcatccctatcagttaattaattcaggcgtttcctgaatacttttaattatacaaaaaacggcatgaaaaaaggaattaaacctttaagcttaattccttcttgataaattcaattttttaattaaaagttagccgccttaacgtacatgttacgtccgattcggtaacagcttttaccattaacgcgcatccgtgaaccataggtcttaattggcgtaccttttctaagcactctccagttagcgcggtttcccttgttattatatacataagcattgtgcttaagtacacgtgaattacctaaaacattacttgccataatgtaacgaccattgcccatgtttaaggcagtcttaccattatcaagagtcactacaccataatgagtaatattagtataagctgcatagtagccgctttgacgctcaccctttttattatagatatatgatttcttcatcacatagccagcagttgctgaacccttatcatcatctgatgaagtactcttattcgaagtatttgatgaagcatttgaagagctagcagaattggtgttgctggtagctggagcttgtgaaattgcgccattgttggaagttacattaccgtcaattgataatggtaaaacagcaatatttccatcaacgcttaatcccttccaattatcagtaaattgccaaattgaaacgccattcattgatgggaagtaattgaagtttggactatcaattctacctgaaatagcgtatgaagcgacccacaatgagttaggatacttggcaattacactattagtatcaatattattttgtaaaactgatgaactagcataaagaagtggcttatagcctgcattttttatagtgtccataaaagcaataattgcattagccgttggcgttttaccaccgtaaatgttattgcccgaacctgtttcataatcacaagcaatatatgaacctttaggtaagccgaatgcttgggcagcttgaactgcataatttgcttctgcagcagcagcacttgcatttgaactaaaagtagcaaagtgatatgccattggcatcatattatttgataaagccgttgaaatttgacttgatgccttagggttacgataggaagtaccttcgctaactttaacaattgcaaattgtgctccagcttgcgcatgacttgacaagtcagcgttttgataactagcaacatcaactccaagtgcgcgggctgcaacagaggtagttgcagcgttcacaactgcagtttgtggtatatttacttgtgtcagcgctacccctgccgtaccaagaacagtcgcgcatgccaatctaacaatgatttttttggttgtagtcaatcttaattcctccgataatgttaaaaatagttgtcgttcacacttgtcgatcctattttttggaaatcaattttagaataagctcgttccaaactttagtcaactgattcactaataatgtaagattaagttaataattgtcatatatttgtatcatacaatatcaaatgtaaaaaaatattgtctttgtagtaaaatttagcacatagatacctaaggtatgtaaaaagcctgtaagaccaatgcttacaggcataatttatgatccgggtgagattcgaacccacgacccacagtttagaagactgttgctctatccagctgagctaccagaccatcttgtatgtttgtacgtcctcaacagaacatagactattatagggaaacgttaattaaaatgcaagaggatttttcaaaaaagtttttattttttcaaattcaattaaagtataattgagttaacatagataattattagaaaagagaacaattatggaacttaaagataaaatcaaaaagtttgttactgactttagagatggtgcatatcagcatgacaccaaacgtgacagtggcttgcctcacgacatccctgaagttgaacgtcttgataatctgccttatggtccagatgaaaagtggcatactttagatgtttatttacccaaaaagcacgaagctcccttccctatcatcatcaatattcacggcggtggttgggtttatggtactaaagaaatctaccaatattatggaatgggtttagctaagcgcggttttgctttcatcaatcccaactatcgtcttgcaccagaaaacgcggaattccctgatgaattagacgatgttgatcgctacatgcattgggttgatgagcacgctgaagaatatcgtctagatcgcaacaacgtttttatcgttggcgacagcgccggtggtcaaatggctgagcagtatgtcactattttgactaatccagattatgccaagttattttcttacaaaccattgaacttaaaatttagggctgtcggcttgaattgtgctgcttccttcatgttaaccccaagcaatttagatggcatggctagcgcctacttcactaaaaatgcagttaacaagtatcatgaacaactcgatgttgaaaaatatatcaatcataatttcctaccaacttttttgattactgccaacaaagatttcttacatgacatgcaatttaccctgtttggcttcttactcggccgcggcgttcatgctatttgcaaatcttatggcgatgaggaaaatccacgtggtcatgttttctttgttgatcaaaaagatgaattagctgacatcgcaaatgatgaagaaattgaattttttagaaaatttttacaaaaataaggacggaaaataatgattaaattttatggttataaacgttgctctacctcacgtaaagcacgcaagtggatggatgaccatcaggtcaactacgaatttcaagatttagttgaacagccaccaaaaaaagaagacttggtaaaatggatgaccaaatatcaagatcgtggtctaaaatatttcttcaatacacacggtcaagattaccgcagagaaaatttgaaagaaaaagtgccaacaatgacgattgaagaagctgcagatatgatgtcaaaaaatggtaagttaatcaagcggccattagtcgttgatgacagtaatttaacttgcggttttaaagaagatattttcgaacaaatttggctataataaaacaagcccataacctgtaactttgtggttatgagcttgtttttatttctttaaatgaatttcacgatcaaacaattgatgcatttcttgattaaagttgtgagcaatgaatacaatcgttgcatccgtcttagtcaactgacgcaaaattttcatcgtagccgcctgatcaattgcacttgttgcctcatcaatcaaaatcaacttactctggtgtaccatgcttctagctaaaacaattttctgcctctgaccaccagaaacattcaattgatcaaggccaatcttagtctcaatgccggccgaaaacttagcaatatctcctgcaaattgaactttttcaatggctgatttaactcgacttagcaattttgaattgaacatcgtaatattttcaacaatcgttactgggaataacactggatcttgcggcaaatagccaatttcagctaaatcaggttgaatcttttcacccttttgattaaagtattgaatcttgccgcgactggcttgcaattcacctaaaatcaatttgagtaaagttgattttcctgtacctgaatcacctgttagtaaaattttctctccagctttaacttggaaatctgggaaagtcacggcctcaccgtttctaaaatcgatagctaaattatggattgaaaaactaaccgcttgttctaaattacttttctgttcagactgaattttctttttagctacaaaaatctcttctcgcaatttctttgttgctcgcattcttccaccataattagcaactccttgcaaagaaccaaatagtgctccattgaagttgccaatgctggcaatcaaaccaaaagcagcccaattatttactaccaaaaatccagttaaaagaaagattagcacatctcctaatgaataagccaattgattcagataatctaattcctgatctactttttccttctcaatatttgctgcttccaagcgtcctgaattttcagcaatagtcttaaaaagcttatcgctagccaaatagcgacgaacttctgataagccaattaaccaatcacctaaagtcttcaaatactttcgattagctactgataccttttcagtagctttttgtaatggcttatccagtaatttaggtaaataaatctgaattgcggcaaaaattaaacaagcaactaacaaactccactgaaaagtcaccaagctaaaggctacaccgacaataccggctagcatccctactacatagcggaacgaatctaaatagtcattatgtaacagtttcaaatcattagtcatccgattttgcactgcactaaccgcatgcttttgactatcggcaaaataatgatctgttagttcttgccgaattaaatgcaggtaattttgaatcaacttttgccaaatgattcccgccaaattatagaataagaataccatgacatagctagacagctggattaatgtccaagttaaaaataaactcaagtttctatttttggcagcatcaaattgcaaagttaacacataatctacaactacttcgccaactgctgcaataatctgtagtcccatagccagacagaatttaattggattaagtttaaataattctttgctactcattattttccctccaagtgaacttcacgatcaaacaatgctcgttgttctacggttaaattgtgtgcaacggccaaaattgttgctctactttgcattaagttttggaagatttttgtcgttgcttgttgatcaattgcactagttgcttcatctaagtacagaatcggcttctcatgcaacaacgcccgcattaaaactaccttttgtttctgtccaccagacagcaattcctgttgtggatcaagctgtgtctctatcccatttttcaaacgcgcttgatcactatcaaaaaccgtcttatgaatcacttgtacagtttttttattaagcttaggcttaaacatagtaatattttcttgaatactgccaggaaagatcaataagtcctgtgccaaataacctaattgacgtaaatcaggtttgatcttttttcctgttttatcgcaatagattacttcacccgtacttggcttaatttgccctaacaaaacttttaataaagttgattttcctgtacctgaatcaccagtcaataaaaccttttcaccattcttcagttcaaagtcaggataagtaattctttcaccatttggatattgtactgacaagctttttatttgaacggtagtgatttgttttaaagaatcataccctttttctggtaaacacttttgcaatttagccagatcatcccgcaaagttttcgttgattttaattgcgtatatctgttcacgcaactatctacactataaaaaattccattggcaaaatatcccgctgtcagaatcgctcctaaatttacctgatgattgaaaaacaaaattccagcaataaatggaacaccaacacgaccagctatattaaatatcgcagacactaagctagtataatgtagcaatttatctcgctgatattcactctgctctagtttctgactctgttgtcccaccacctttttcaaaacaactttattctggtagcgtcgcagctcatctaaacccttgaaccatttttctaacaactgcaaaaattgcttattttggatagaaacagctttagttgctcgattggtatatttttcagtcaatttcggcactactactgcaagcaaagtaactaataacgtatagacaaccaatatccaatgaaaggtaaacagcgtaccaatagttaaaataatataaattaagtcacaaacaaaatagaagtaaacattatagtaactctcttgcactaactgcaagtcatttcccaaatgattttccatctctgaaactttgtcttcaggctgctgataataatgtcgtataattcgttgtcttacctgatgaaaaagtgtctgtgtttgtttggtattttgtaaacttccccaattaaaactgacattgcagacctgtccaattaaaaattgtacaaagattaattccaaaaacagtttgaatttaccacttgcaattgcatttaactgcggactagttaagtaggtgtacattgtagttgtcagttgcgttagcgtaatcaaaaacagaactaacattgcccgctgacggttagttttaatataatctcttaaacccattattttcctcattcttttttgacaaaaacgtataatcagcaaaaaaatctctaacatgatttgtcgcaaagaaaaagcactgttctggatgctcacatcctattaacagtgcaacaaataaaggttgatttcgataaagaaaaccaccctcaattcatctactgctaatacttggtatgcaagcaaaaaatgggtgcactaaacaaggtgcaaagacagtattttgctaaacaacaaatcaaatattagagattcagtaaacgaatcatatggcaatttcctctatttctataagttaattaaaactatatcatattaatttaattttacaagctattttttatcttcagctaaatatttttgcaaaactttgaaaacaccgttctccgtattggccggtgcaatatatttcgcctgcttttttaccttgtccataccgtttgccattgcataagaatatttggcaaatttcaacatatcgatgtcattacccccatcgccaaaggcaatcaggtcatcccccgtcatccccatcttttctaggagatgctttaatccggcgcctttattaacaccttgtgtgttaacatcaatggcaaaagtagcggaagcaaaagcagaaatctggttatcgtgcttagaattaaaatctcgttcaatttctgcagccttagaactgtccattccaaatgtgatctgataaatcttatctggtaagtcattccagtcattaattacagtgctattaccagcaaagtaagccaaaaagtcgcgttcatctttttcaacattgctatgcaaatatgcaatatctcggccaaaaaccatcgtagccatttaaccatatttcacatgtacatcatgaattagctttaaaacgtcatcgcgattaagcaaataactgccagcttcttgacccttgatgattaatctcgagccattcaaagttacgaaatccattctgctggcaaacttgccaaagtcctgcttcaatctaacataaggacgccctgaagccacgataaaatgtactcctcgttgttcaaattcagtcaaaatttgatcaaattccttgtgattaaactgcttacgatcatctaaaaacgtgccgtccatatctacagcaactgccttaaatggtaaagtcattttttcaccccatcattattctattttttccaaaaataatcttatcatttttgagcatcctatttcatccgtaatctaccacgttttagtacaaaatagctaattgttaatagaacagtgctggtaagaagaaaaataaaattatcactccaaaaataatgccaacctatttttgttaaaatatctggcgttaaaatttcttctactgttgcatagatataaaaaacagcaaaaaccgatgcaattaaatagcctactccagctaatgagtaaaaaattatgctaatccattttttagtcaccataactcggtttcctagccaaacgaataaaatagccgtcactaatggcaaaacataataataccagaatcccataactatccccctgattaattttggctcattatcacatgcaaaagtaaaaaaacggtaaagaagactttaattttgggcaaaaaaagaccagctcacttcagagctagtcttatctattctattaaactaacttaacgtgcttagcatgcctgttcttgagcttagcccaaccatcgaaaaacaatgccccaaaaagcaaaatcataataattcctgccaaaataatggcattagtcgaattagcaactgctaaactttgggctgaatcaaaatcagcaacttcgtccatttggataatcaatcctgaaaacaacatggctaagccgttcaatgttagcaagccacacagaattgttaagattttagtctttaatagcttcataaaaccatgccctttctttattaattagatgaatattatacacgcattattttataacttaaacttcccacatcaaataagctggcaattctttgatattgcttagctttgggcttctatactatttttgctagttttctttaacaatttttgcatgtatttgggtaaacgattgataaagtcagccgtgaattctgctatttgtgcttcactggcatgaaagactttttcaacgctagccaccattgcttttgtgattagctgaagtgaatgactgaatgtaatatccgccagctcatcaatcatgcaatagaaaagctcacctaaggttcgctcatcttcgtcgtcccgcttggctactgacatgagcatatagcgggtaaagactatagccacatgagcagtcaaggcatcgtaggacagaccatgatattccgtgcttagttttaggtagcttttgcaggttttgaaaaaaacttcaatatcccagcgtttgccataattgcgaatgacttcatcttcgctaagcgacatgtcggtacaaataatagccagccactctttacgattggcacggtttctaacgcaaattatccgagcgtcaattttagcaccgtctttgtcttggcggccaaccttgactggaattgacaacagatagcgcgaacgcccgcgtcgctttttacagctacgataaatctgtttgatgtttttgcgttctccttcaaattcatatttgattttggagctaactttaaccatggcaattacatccagcttcctttgcttgagctggacgatttgatgtggatttgagaaccagctgtcaaacagcacgtacttggcttgatgacctgctttcatagcttggtcgattaaattaaccatcacgtctgtgcctttagtccgggcaagcatgcgtcttttgccagcaatggtgcgctgatcacagactttgttttcgccaatcatattctgtagcttgtgagaggacagcaacaccgaattgattggcatgaaagaagctccatcagtccagcccagggtcatcatgcgaaaacctttcttgtaagtcattgatacatggtcaaaaactttggcgactaattctgttttcttgaagccggtcctagagaagtaggaatcatcgacaacaaagcaatcagcccgtttttctgaagtcaaagatcgcaagtgattattaatgatttgcgcagaaagcagtgtggtgaagtggagccaattgacgtggacgttgcgcataaatcggtaataagaatttttagaaaagctttctttaaaatgatccgttttcagctgcatatataagctgcggtcacgaaagacattgcttaaaacgtaaagaaacaagctgaacaggctaatgcctttttccttgcggaagccacattttctcaacagcttgatcacctgaaacttcttgatgaagctgatgattgagtttgaaaatagttgttcatttttttggtcaggagatggtaaaatagacattggcacaagcctttcatgcatagaattatcgtttggtcactttaattatagcaatgaaaaggtcatgtgccttttatatttgttaaaaaacgcagaatcacaataaaaggagcgattctgcgtgtgggaagtttaagttataattcaagtaattggattaagaaaaggcacaaaaaatagacatacgttcgcatgcctattactaactttatttattccacaggaatttgattaatactttatctacttttggattctcatgcaacttggagtgacgtgcattttttccagtaaacttcactacctgatagcttttagcacgatctgccactaaatactttaatgacaaagatgatacattgggtactgttccatcggtttgaccaccaatatcaccaatgatgtttaaaacacgaaccttatttttcggatatgtttctcttacacccgtcattttccgatagctagcattcattttgttcggttttccggcagaattcaattttaaacctttaggttgacgaattgaggcgggaacacggctaaagttcaaaccagcaaaatgttctgccatgtcgacttgcttgactaattgtggcatcttccggttacgtccattttgcagcatataataaatgatcgaaatatttcctaaagaatgaccgaacatgctcattttttaataccataacgcttttgcagagccttcactacattagtggcgtaaacaccatgtcgagaaaagttcaactcacggttattttcataattgacttctacaattggatttttggcaccttttttccaacttccactcaaagaaaccttaccgttaggcgccacctcagctctaatcactgagttcgtgaccccagctttctcagctgctgccaccatgtgttcttcagcatgatatgacgaaccaccaccgtggaaaaataatgtcggtgttgaggtgattttagtctgacttttagtatgatcaaccttattctgattagtacaagctgtcagcgaaattgtaaatatcgttgtaagtagcaagacaagtgaaaacttttttctcatttagcatcaccgatttgtttaagtccattttaaagaaaataataccaaaataaaaatatttttcgcttattaacttccatatctattggttatagccacaattaaaagtaaaatagaaagtaattaaactgcaaaggagaaaaatatgaaatataaccaatacgcttatgtcgaaactgacttcgatcaacaagtaaaagaattaatcgacatcaatttcttacctaaaaattatgcagactggaattttaacgatttgctgggcaagctcgttaaaatgacaattgctgaagcaaaaactgacgctgctaagacaacaaaattatctgaatttgctgtttcaaatgagcaaactttagctgactttttaaaaggaaagcctgaatcaattggtactgctcaattctataatgtagccttacaattacttggctatcatgttcattatgactacgaattagccgatccaaccggctttatgcaaaagaatgctttaccttttgtccaagacatttctgatgtcaaaaagttaatctctgctttttatcgtttgctcaatactcgcgccaaaaacggtcaaattttgctcgatgtaatggctggtaaggggtactttactcaattctggggacaaaataagtttaaatttttcaatggcaaagctattcctgtcttcgataccaacaaagtaattcgtgaagttgtttacgttgaaactgatcttgatactgatcatgatggtaagagtgacttgattcaagttactgttttccgaccagctgaaactaacaaaggcttaaaagtgcctgccctttatactgcttcaccatatttcggcggaattatcgctaatgaaaagcgtaaccataatgttgatgaaaatttatctgatgccgccgattggaatgatccacaatatgttcattcaccaatagttaaagcaaagcagccagacgactctaaccacccagctaccgaagaagcagtacataaatcttcttatccattaaatgagtatatgcttgctcgtggttttgccagtgtttttgctggagcaatcggtacccgtggtagtgatgggattcgtattactggtgcacctgaagaaactgaatcagctgctgcagttatcgaatggctccacggcgatcgtattgcttacactgaccgtactagatctgttcaaaccaaagctgactggtgcaatggcaatatcgggatgactggtcgttcatatttaggcactttgcaaattgctattgccactactggggttaaaggtttgaaaactgtggtttctgaagctgctatttcttcttggtatgactattaccgtgaacacggtttggtaatcgcacccgaagcctgccaaggtgaagaccttgatttactggctgaaacttgtcaatcaaacttgtgggatgcaggttcttacttgaagatcaaaccggaatacgacaagatgcaaaaagagcttttaacaaaagaagaccgtgaaaccggtcaatattccaacttttgggaagcaagaaactaccgccatcacgctgacggcatcaaatgttcttggatttctgttcacggtttaaatgactggaacgttaagccaaagaatgtttataaaatttggcaactagtcaaaaaaatgccaatgaagcatcatcttttcctacaccaaggtcctcactacaatatgaacaactttgtttctattgattttactgacttgatgaacctttggtttgtacatgaattactagggattgaaaacaatgcttacaagcaatggccaaccgtcatgatccaggacaacttgcaagctgacaagtggcacgaagaaaaggattggtcaaatgaattaggtcaaaagaaaacctactacccaactgatgacggcgagcttttccaagatggcaatggcaaagcacaacaatcatttgtcgatgaaggtggcattgaatttaagaaggctgacatctcagaaagcgactggctatacaagttcatctgtggtgatgaaaaatgggctaaaccaagtttgcgttttgaaacagacgaatttattcacccaactacgattgtcggtcgtcctgaagtaaaagttagagttaaaggcagcttacctaagggacaaatttctgttgctttagttgaattgggagaaagaagacgcttaaccgctacacctaagttcttaatgcgcggcggtcaagaacttggctatagatttggcactgatactttgcaagaatttgtgccggacaagaagactaaggctaagttgatcactaaggctcacatgaacttacaaaactataaggacatgaaaagacctgagaagattgatgctgacaagttctacgatttagacttcttgcttcaacctacctactacactcttccatctggtagtaagttggccttgatcatctactcaactgatgaaggaatgactaaacgaccacttgaagaagaaacttatacagttgatttggccaatactgaaattaagttctatgagaaataatttttaatatataaactaatacggcagatatttattttaagtatctgccgtattttttattcaaatattttcttatattcaccatagccagcctgttccaactgatcatatggaataaatctcaatgctgcggaattaatgcagtaacgtaaaccaccttgatccactgggccgtcagtaaaaacatgacctaagtgagaatcagcttcgggacttttaacttctgttctctccattccgtgcgattgatcgcggtggtaagttaatttcttaattggcttagtaaaactaggccaaccacagcctgcattttacttatctaagcttgaaaaaagtggctcacctgacactacatcaacgtaaatccccttttcataaaaatcatcatattttccggtaaaaggatattctgtagcggccttttgagttacgttatattcctcatcagttagccgctttaaagcttgctctttttcttctttgttaaaagtcatcggatcattcctttgctaaatatgttcagtagtacttggaaagaaattatctattttcttttcataaatatcaaatttatattttgtcaaaaattgatttgatggatcatatattctaacctgaagcatctcatttttgccattcatatgcacttctttatttgaaacttccaaaaatggcttaaatgcagcaatcagattttgataagaactataaacatgcacattatgttcgacaatttctccattacgtgcataccgacgaccgtcgatcacgtatactgtattatcactcatagaaatcatcctctctttggcttctacttatattttaattcattttatatttattcatgaatttttttactcaaaaactccaacaattatcatgttggagttcattcaatatttatttaaaattcattaaaatactgaggtcaaaactgcaccggcaacaattaatattaaaccgatcacagtatagacaagacccttttgtgtcttcttttcgtgtaagaaaaggataccaccaagagtagaaataacaacacaaagttgtgacataacaaaggctaggtttacaccgttcatcttaactgaaacaatgtatgcaagagcagcaattgcgtaaatcacaccggcaggaattacttgataactttctttttccttaaagacttgtgtttgcttagttgcaattaaataaacaattgctgcaaccaacattccaatggtttcagcaaagaaaatcattatgctgtcacccttcaaggcctttggaatggaacttgaagtaatgtaaccaagtgtagtcaataccagcacaatcattgtagtggtctgattcttttttccaccttcagatgtacctttgtcagtcaatgatgtaaatgctacaccaataattaaagctaagatccctaaaaatccaaacaatttagcttgagtgcttgcccattcaccaaagatcaacacacctacaagtggcacaccgatcaactgcaaaccagttgaaattggcatagtttcagaaaccccaaccttggaataactgtaatactgaccaacttgaccaataacccaagcagcaccagctaacattgctaaaataaaagtagtcgcattaaaagatggacgcttaatgagagtaactgcagcaccaaagataaatgcaccaagaacggtacctaaaatttggtggtaaatgttactcttcttgacaccagcaacaaacatgggcataagaccccatcctattgccggaatgaacagaaataaataactcattcgttttgtctcccttattaatgtaaaaaagttacaaaaagcattctatcaacgaaagcgagactgtaaaatagtttgtgtaaggatgaatgattccttaaatttatttctttaaacattagaaaaaggggttcctttctcgtatgattggtttgaacaaaaaaacacatacagaaagaagaactccttcatgaatgattttaccaaagattttgctcaagctctattcaatccagacaaaataaatgatttattgcgcaaagagctacaacaggctgttaataacttgttagaagctgaattgaccgcctttctgggctatgatccctatgccagaaatggctggaatactggcaactctagaaatggtgcttatttccgcaaagttgatacgcaatttggcccaattgaagtgcaagtgccccgggatcgcaacggtcaatttcatcagcacacgctgcctggctacaagcagcactcggatatcttggaaagcatgattatcaagctttactccaagggcgtgaccaccagggaaatagccgatctaattgaaaagatgtatggcagccattacagcccagctcaggtatcaaatatttccaagcagatgattccaaaggttgaggcttaccacaaacgcaagctaagcgacaagtttttctgcgtctatttggatgcggcataccttcctttgcgccgagaaacatttgagcgtgaagcagtctatattgccattggcatcaagcctaatgggcacaaggaggtcattgactactgcattgcgcctagcgagaacattgaagtctggacagatatgcttcaaaacatgaaatcccgaggcttaaagcaagttgagctttttctttctgatggtgttgttggcatgaaaacagccttggccaggacttatcctaaagctcattttcaacgctgtttggttcatgtcatgcgcaatatctgcgctaaagtacgcgtcgacgatcgtgaaaagatcatgaacgaattcaaacaggtgcatcaacagacaaacaaagaagaagccacagctgtcctgcatgacttctataccaaatggggcaaggtttacagccatgttatcagaagcttgaaagacatagaaccagatctgctggtcttttataactatcccaagcagatcagagcttcaatttattcgactaacatgattgaatcatttaacaatgtgatcaagcgcaaagctaagcctaaggcagagtttccaactgaacagtcgcttgatgcttttattggcattcaggcaatgagctacaatgaccgttatttcaatcgaattcataaaggctttggtcaggttcaggacaccttagaatcctactttgattaaataaataattaaaaaatcaatttacgagaaagatctatttacacaaaagatttgacagtttcacgaaagcgcttttaatgcaagcgatttactattaatggatgacaagtgcaaatcaatatatatcagaacaccaagagttatttaaattatttttataaaaatcctacggcaaagcctattccatataggaatatacaaattattcccaaatacaataagcaccatttagccacttgcttcaaaattattgattcagatccatcttgtccaattgcagctgaagcaacagctatactctgaggtgagatcatctttccagcagttgctcccaccatatttgaaccaactacccaattactatttacgcctaaagccttagctgaagacaattgcaggttaccaaaaagaacattagctgaggtatcagatcctgtaataaacgtacccaaagcaccaattaacggtgcaactaatggatatattggtcccattagaactactaatgctgccgcaattgctgaagtcattcctgcgtagcccattaccttggctaaagccacaatagaacaaattgtaattaatgttttccataatccaaaaattgttgattttaagatttgtcctaatttcttgaaactaactttttgaattaatccaccaataaaagtagctagcaaaattaatgttcctggtgaagaaagccaattaatcttaaacagttctgtatctttcccagtatataccttaatataagaagtcacttttcccaatagatgctgaatatctggaaacagtgatgaagcaagaaccacaaatacgaacactaaaataaatggtgaacttgcacgcaaaatttcgatagcgctgtgcttctcaatattctcttttatgtcattatcttgatgatgatataattttgccatcagaactgtagtcaaaatacaacaaattgaaccaacaattgctggtaactctggaccaacaaattttgctaccaaaatttgcggaattgaaaatgacaaaccagacatcagggtaattaatcccactcctttgatagctttaactccgccacctgttagaatcaccaataaaaacggaattataataattaataatgcaagttgtaaagtaataacaaatgataatggagtaacgggcaaattagttacgtcactcagtgtaatcactggtaatccaattgcaccaaaggcagttggtgtagtattagcaattaaacaaattatggcggcattaatcggattaagaccaaatccaattaatatcccagcgggaattgcaactgctgtcccaaaacctgcaattgcttctaagaatccgccaaatccccatgcgataatcaaaactaaaatacgctgatcagtagtgattgacgacaaagtatcttgaataattttaattccacctgaataattgcttacattataagtaaacagtgcagccacgattacataaacaattggccatagccccatcagaatgccctctaaagcacccgtcaaagtgtcaactatagagaggttaaatcccagtatagccaatacgatagtaattaatagtccaatgctgcatgctttaatagcaggcgtttttcgaattgccaaagagtaaataagccaaataattggaattaaagccaataaaaacgaaatccacatttttatttccccctaaacacttcacttccttatctcagattataaatgtattcgcttacaaaagatagtgaaatattcttactcatggctctataataaagtttgtgatacatatttttttcacaatatcttgattgaatgctatctatcgtttatttatctcagaattattagttcacttgtgaaaattattttttgcataaaaaataatgcattctcctacttcaatagagaaatgcattatttttatctattcaactatcctacttcaaagcatcagtagcaaatgatctattctccaagctagtaagcaaagcatctgcagtatcaagtgctgtaatcaatggtacattctgaccaatggcaacctgtctaatgatgaagccatcagaattcttttcaatatcgtgacccatcgtattgataaccaagtcaatcttgccatttcttaattcattcaagatattatccttggcgtcttcatcttcatgcactttagttactggatcaacatgcaaatcatgactgcgcaagaaatcagctgtacccttagtagcaaagattctgtagccaatccgcgcaaatctcttggcaattggtaaaatcttttctttgtctcgatcttcgatggtaagtaatacattaccattttcaggcaattgcatcttagcacctgcaaaagctttgtagagagctttggtaaaagtgtgatcactccccattacttcacctgtcgatttcatttctggcccgagatatgcatcaacgtccgataatttgctgaaggagaagactggtgctttaacagagatcatgtctggctctggggcaagaccatcaccgtagccctgttcagccaaactttcgcccataattactcgggtagcgacctgagccatttcaatacccgtgatcttgcttaaaaatggcactgttctacttgcccgagggttaacttcaattacgtaaacttcaccatctctgacaatgaattgaatgttcataatgccgacacagttcaaagtcaaagcaagctttctagtgacatcagtaatcttttctttaacttcatcagagaaggtttgtggtggataaacagccattgagtcaccagagtggacaccggcatgctcaatatgttccatgattcctggcaaaagaacttccttaccatcactaattgcatcaacatcacattcacgaccatcaagataatcatcaaccaagattgggtggtctgctgcaatatcaacgtggtcttgcaagtattcttctaactctcccttggtgtagacaatttccatcgccttaccacccaaaacataacttggacggactaaaactggatagcctagcttatcagcagcttcaagtacgccttcatgagtagttgcagttaaaccttgaggctgattcaaatgaagttgcttaatgatttgatcaaacagttcacggtcttctgcacggttaacatcagctactttagtgcctaaaatcttgacgccatgttcttctaagccatgagccaaattgattgaggtttgaccaccaaattgaacaatcacgccttctggcttttccaagtcgcagacattcaagacatcttccaaagttaatggttcaaagtataatttatctgagatagagaagtcagttgaaacagtttcaggattagaattgataacaattgcttcgtagcccatcttttgcaaggccttgacacagtgaacagtcgcataatcgaattcaacaccttgaccgattctgattggacctgagccaataacgatcaccgacttcttaccagtcttatgtgattcattttcagcatcataagttgaataaaagtatggtgtctttgattcaaactcagcagcacatgtatcaaccatcttgtagactgggatgatgccatgctttttccgaaatgctcttacctcatctgcagtttcattccacaaagaggcaatcgttggatcactaaagccatatttcttagctaagcgcaatacatcaacatcatctttattttcctcaagtgtcttttccaattcaaccatatgttgcacgatatctaaaaagtagaaattaatcttcgttaattcatgaacatcttcagctgaataaccacgtctaaatgcctcagctaaatagaagagacgatcatcttgagctttgactaatttttgctctaattggtcatcactagctacgtgtgcttctggtgagtaaagatctttttcatcaatttctagtgatcttaccgctttttgcatagcttcttctgcagtacggccaattgccataacttcaccggttgctttcatttgggtgcccaaaacgcgatcagccttagggaacttatcaaatggccagcgtggtatcttgcagactacatagtctaatgcaggttcaaattctgcataggttgttcccgttactgggttcttaatttcatccaaagtcattcctactgcaattttagcagccatcttagcaattggataaccagttgccttagaagctaaagcagatgatcttgaaacacgcggatttacttcaattacatcataattaaagctatttgggtcaagagcaagttgaacgttgcatcccccttcaattttcaaagccctaatcaaacgcagtgaacaatcacgaagcatctgatattccttatcagataaagtttgacttggtgaaaagacaattgaatcaccagtgtgaatccctaccggatcaaagttttccatgcagcagacaatcattgcattgtcatcatggtcgcgcattacttcaaattctacttctttatagcccgcaattgatttttcaatcaaacattcagttacaggggaaagttccaatccatttttggcaatctctgctaattcttcatgattattacagataccaccaccggtaccacccatcgtaaaggcaggacgaacaatgatcggatagccaatctcatctccaaaagctaaggcatcttcgactgtattaactgtcttagaaggtggaactggttcacctaatgacttacataattccttaaatttttcacggtcttcggcttgttcaatagattgcagcttagtacctagaagctcgatgtgtaattcatccaaaattcctgttttggcaagttccatagccatgtttaagcccacttgaccgccaagtgttggcaaaatagcatcaggatattcttgacgaataattcgtgaaatcgattcaactgtcagaggttcaatgtacaccttatctgcaattgttgtatcagtcatgatcgtagctgggttggaattaactaaaactacttcatagccttcttcgcgcagagccaagcatgcctgtgtaccagaataatcaaattctgcagcttgaccaataataattggacctgagccaatcaccataatcttatgaatatctgttcttttaggcatgacgctcttcttcctttctctgatcaatcattgacataaagtcgtcgaataacgaaacctcatcatgaggacccggtgttgcatcagggtgaaattgcactgaaaatgcaggatatttcttatgacgtaacccttcaaccgtcccatcattgacttcaacgtgggtaatcattaagttatccttgtcaattgaatctgcagacacagcataaccatggttttgtgaagtaaaaccaatattaccagttgcaatctctcgtacagggtgattaaaaccgcggtgcccaaatttcatcttgtaagttttagccccattagctaaagcaaagacttggtgtcccatacaaattcccatcaaaggaacatgcttttctacttcacgcaccattttagttgcctctaccatttcttctggatcaccagggccgttactcaaaagaacaccatctggatgaaggtttaatacttcttgggcagtagctgtatatggtaaaacaatacaattacaatcacgttctgctagttcacgcaaaatactgtgtttaattccaaagtcgataaccacaatattgcgtttcgaactaggaactggatatggtgacttggttgatactcggctaattacaccttgagttacattcttaatctttaattctgccgcaattttttctgcattttcttttgaatctgcaatcttaccacgtaatgtaccgtgaactctcaattttttaactaattcacgcgtgtcaattccctgaatacctggaatgttcaaatgctccaaaaactttggtaaggttgtctgcattcgccaattatcaggatgacgggcaacctggtgacaaattacgcctttgatccttggctcaagtgactcataatctgccaaggtaataccatagtttccaattaaaggattagtgaaaaccaaaatctgatcggcataagattggtcggtaattgcttcttgataaccagtcatccctgttgtaaatacaacttcaccaactgtttcgcaatcagcgccaaaaccctcgccagcatagatgctaccatcttctaggattaaataccgcattattgttcatcccttctgtatacaacctgaccatcaaccatggtcattacagtttcaccatacaccttgtcgcccgtaaatggtgtattaacgccttttgacttatagtcttcttcttttaattcagtttcatggtctaagtcaaaaatcgcaatatcagctggcttacctggttcaagtaccccggcattttttaagccaaacgttttagctggtttatcggagagccatgataaaagctgctccaaggtgaagactttttcttctttgacaaatttagtatataaagtagaaaatgctgtttcactaccagtaataccaaatgctgcgcccttcatgccaccttctttttcattgcgagcatgaggagcatggtcagtcgcaattaaatcgattgtaccgtctagtagtcccactagtaacgccgcttgatcttccttatttctcaatggcggattcatcttataataaccgttgtccttaggaatatcgtcatctgttaataaaatatggtgtggcgctacttcacaggtaacattgattccacgcgccttagccattcgaaccagttccacactagttttagttgatacatggcaaatatgataatggacgcccgttttttgtgctaaaagcaagtctctagcaatttgcgttgtttctgctaattcagttactggcggcaagtttaatttcttggctttaggtccttcattcacgatccctttattaaaaagcgaatcgtcttgtgcatgagtagcaatgatcaaattattttccttggctttttgcattgccaaatacatcgtttgagcagtttggactccatgaccatcattacttaaggcaaaagcaccagcctttttcaatgctgcataatcaggaatgacatcagtagtttcatcattagtgattggtccatattgaaaaatatgaaccacacctttttcattgttttcttgtaccattttttgcattagctcaggcgtattaggtacaggcgttacattaggcattgcccctaccatagtaaaaccaccatgagcagcggcttcactaccggttttaatatcttccttgtaagtttgtccgggatcacgataatgaacgtggacatcaaccagtccaggactaactagcttgccacttgcatcaatctctttatctgccgttaagttagtccctattgctttaatcttttgatcttcaattaaaacatctgctttaattagacgaccattttgataaactgtgccattcttaattactgttgccattattctaatcctccaagtcgtctaccgcgcaatactgcctcgatcattgccatacgcatgaacacaccattttgcatttgtctgacaaacatgcacttatcgctttcaactaaatcaccgctaagttcaacatcatggttaattggacccggatgcatgatgatggtgtcgggcttcaatgcactatagcgttgctgattaataccatatttttcgtgatatgctttagcattaaaagtcttttcattaggatcgcctgcatgacgttcatgttgaacccgtaagagcatcatcacgtccatatttgaaactaattgatcaatttcttcatacttaccatattgatcgaattctttatcataccagtaacttggacctgagaagtaaacttcagcgcccaacctagtcaaaagttccatgtcactttttgcaaccctagaattagtaatatcaccaacaattgcaacctttaagcctttaaagtggccaaaatgttcatgaatagtcatcatatcgagcatacattggctaggatgttgaccgctaccatctccagcgttaatcacaccaatatttaaatgttgatgttcttttaagttaatcaaatcattgtaatactcattctgtgagtgacgaatcacttctaagttgacacctaaggcgttcataattaatgaagtgtcatataaggtttcacccttattaacagacgaatgagccggatcaaaaggaataactgtcaaacctagttttctttcagccatttcaaagctcgtatgtgttctagatgaatcttcaaaaaacatattagttacataaactggcttagttaaacgtggtgttgcaccgccttttttgaagtactcagctctcctgattaaggcttctacttcattactatccaaattttcaacactcacaaaatgtggtaaattaacaagatttaaattttccattttctattctttctatacaaaaaagcctgaagcatttaattgctccaggcctagagtcttcccgtgtacacgaaaagaaatcaacccttctggccctctctggagtcaattaaatggttggatatttaactatcttctttttattttggtaaagccttcagttcaactgaatctttgccgtccttctcaattacattaacagcaacctgttcatcggcagaagttggaatatttttaccaacaaaatcagcacgaattggcaattcacggtgaccacgatcaactagcactgcgactctgattgaacttgggcgaccaacgtgcatcaaagcatccatcgccgctctgattgttcgtccagtatagataacatcatcaatcaaaacaacatgcttgtcatcaatattaacaccaacttgatcagaattgacaactggatcttgctttaaactagcatcatgacgatcatcccgatataaggtaatgtccaattcaccaactggtacatcaacgccttccaatttctgaatacggtcatgaattcgtttagccaagtaaacgcctcgcgttttaatccctaccaaaaccaaatcatcggttcctttattttgttcaatgatctcgtaagtaatacgggttaaagcacgcttcattgctagtgcatcccagatttcttttgccattatagcctcctaattctgcccatgaaaaaagctcccaatctcaactgagactaggagctttagtaaagtcgaaacttaagttaagcctgcctcgctagcctcacgggactaattttaaaggacattcattgctttaaagttactgtaattagaaacgtttgtcaagctctaattaaattttacttgaccaactaattcattgatatcttcaatgcctaatttttcaagttcttgcggcaaggcatctgcaatatgcttagaagcaatactatctttaaaatgagcagtaccaaccgctacggcattagcacctgctaacataaattccaccacatcttcggccgaagcaatgccacccatgccaataattggcaaagaagtaatttgacgcacttgactaatcattctaatagctattggcttaacagcctcacctgataaaccgcccatattatggcctaacagtggtctgcgttttttcacgtcaattcgcatccctagcaatgtattgatcatcgataagccatcggcaccacccttttcggcagctttagcaattacagtgatatcagtcacatttggtgttaacttcacataaattggaatattgacaactgctttaatttttctagtcaattcttcaaccacatcggcatgcacgccaaagctcattccaccttgggccacattaggacaagaaacattaatttctaaagcattaaccaagccggaatttgacagcttttgtgctacttcaacataatctgcttcactatcaccgccaacgctagccacgatcggtaattctggatattgctttctcaatggttctaacttttcactaatcaccttgttcacaccaggattagtaagaccaaccgaattcaaaaccccatcatctaaaacggcaatctgtggttgcggattacctgtggttgcatgtggcgtagttgtcttaataaccattgctccaagatcatttaagtcaaacttcttagctgcaggcacatcgccgaagccaaaagttccacttgctggcataactggatttttcaaatctaaacctggtaattttacatgtgtattaaccataattttcctccaaaatgaatgctcacggacactctttattttttcaagaaatgattctacacgtgattataattttttccaagcaaaaattttatttgtatttttacttttgaggtgttaaacttcaccttgatcaaactttaaacggtacagagagaccgcaagttcaaaatattgacttaaattatctaggaaaagtctatccttggtgtctctctgcgctaagatagactttttttgtggaggaaaaatgaaacctgtaattgttgcattagatattgacaatgaagagcaactgcataagattttgtctaaattaggcaaaccagaaaacgtctttatcaaagtcggtatggaattattctatcacgctggcaaccaagtggttaaagacttagctgagcaaggttataagattttcttggatctaaaattgcatgatatccctaataccgtttataacggggctaaacaattagctaagttaggaattacttttactaccgttcatgctttaggcggcagtcaaatgatcaaatcagctaaagacggtttaatcgcgggtacacctgttggcaaaagcgtgcctaagttactagcagtaaccgaattaacttcgatttctgatgaagtattggcacatgaacaaaattgcgcactgtcaatgaaagagcaagttctttcgctagcaaaaatagctaagcactctggagcagatggggttatttgttcaccacttgaagtaaaagaattacacgaaaaagttggcgatgactttttatatgtcacaccgggaattcggcctgctggcaatgctaaagacgatcaatctcgcgtggccacaccagcgcaagccaaagaatggggctcaagcgctattgttgttggacggccaattactttagccagtgacccagaagctgcatatgaagcaattaaaaaggagtttaactaaaatgcataaggatcaaattatcagtcaacttattcaagaaaaaattatcactatctcacctgacaaaccattcacttacgcaagtgggatgctttctccaatttacaccgaccttaggttaacggtttcatatccagaattacgcgatatgattgctggtgatttagctaatttaatcgccaaagaattccctgaggctactattattggtggcgtcgctaccgccggtattccccatgccgcatgggttgcagataaactgcacttaccaatgatctatgttcgtcctaagccaaaggatcatggcaaaggccgccaaatcgaaggccgtttcagtaaagatgataagatcgttttaattgatgacttaatcaccactggtggttccgttttaaatgcagttaaagcaactgaaaaagatggtggcaacgtcattggcgtttcttcaattttcacctactacctaccggatgcaaaagaaaactttgctaaagctaatgttaaatatgctccgcttctttcctaccctgaattactcaaaaaggaaaatgagtcaggtcatatttctagcacgcaatatgatgtcttaaagacctggcacgaagatccatgggcttggggcaaacaattcgaaaaataattaagccaaaataaagaccagtttcagtttgaagcaatgtcattaagttaagacattgacaaattatcgacttggacttttaagatcattcatttgcgatttatcgcatttgaatgctctttttcatgccaaataaacctaaatcttgtttagaaattaggctacacgatataaataatatacagctgatttgggtttgagatttcttttgtcttttcgtcctggtctgatcggaattgtgtaatgactaatttgaataagaatctttttaaagatttcagttgaagaagaaattatatacatagcctggatgacaaaacatgactgtttgaaattgatcgcatattgatacttgcattttttttgtggtacatatgcttgagcatcaatttgactgactgcgttaaacataatcatgtgggcatagatctccatttcaataaatctatcctgcttggaatgaaactgtacgctacctaaagcatatttcaactttttgaatgaagtttcaatgccccagcgcaaatggtagatttctttgatcctttttaagggataatcggctctatttagattagttagaacaacttcccattcttctttgcctgatttaggatcattaattctaaatttacaggcacgaaattttattgtacataactctccaaagtcccagctgccatctttggtatttttagaccgatattttatatattgacggtaatgatggttaaccaaatgaacgttttctgtagccttatgggtttcataataataattagaggtagtcacccagcaagctatatccttatcacactcttgattaggcaactcagctacttccttaaatgcgccatatcccgttttagtacgtatgacataataacagttaggcaggcgattacaattttcaatcatgttaaagccggtataacctcgatccatagtaactatatatggtccgcaatttagctttttaagcatttgaacggcggctttacgttcatccatctttgacttaggctgaaagatgcagtcttgataagtattatttaacaggtcatagagtgcattaacatgaatttggcaatatggctttcctttatgattgagatttccaacgatattctctgatttaggattccagatttgattaaaatcagacccatcaatggcaaatatacgatatttatgatcaaataactggatattaaataaattctgattaaatacagttagaatatgcttaaaacatgcgggtgaaagctgacctttgcgttggacataagcggaagtactgaccactttatcgttatttttaatagctttttggccaaaagctctaaacaactcactggtcaaatcttttccttgcatattaatagtagttttaatgactgtagctgcatctaaaaaccgcttcctagtgaaggcatgaggatcatcgataaaatcatgaatatgctttccagtatcattgataatttgatcaagacgatctaaaatatttctgtgaagggctttcataattaacaccagctttctggcaataattttgaaggtttaataatttaatcagagggcgaaaaggtaggttcttttcgcctttattttatgcaaaaaaagaaccaaatcataatgattcggttctacagagattagattcaatttgtcaatgtcttaacttaatgacattgcagtttgaagctggtctttatttttttgttttaataccaagctggcttatcaccgtcggtatttggtttatttaaaccaacattaccacgactgtctttactttggtctttaactatttcatttacataactagccacacttagacgagagacctcagttcctttaaatggggtagttgcgccttcagttatttcatagtcaacttcatctttattggtcaaccaagctggacgaataatcgtgtaatccaaatcgctagcagtaatttgatcagcagctgcacgataagtggtcaaatatgaacctaaaatattcttgttccattcaccaaatttgcctggtacctcatcatagactcctaacgaggaaatccaaatcaaacgcttaataccatcttcatccatagctttaacaactgtcttagcttgatcttcaatatttgaaccagctaaattagcataaacgatatctgcgcctttaatagccggagcaagttcatccaatttacttgcatcccctacgacaatcctttcacgttgatcatcgatatcttttttatccaatttattaggatggcgtaaaaataaaattaattcattatttttatcttccaaaaataaattttctgctaatttagcaatttgtccacttgcaccaagtactgcaattttagtcatttttctttcctcatttctatcaaaatttaacttacaattacatagtaaaacttatattttgtaagtcaacgatttaccacagataacctgtatacaagtttttagttttattagttgcaaataatataaaaaataaaaaagttgtaaaattatcttagttaggagaaccaaatgaataatcaagaaaaagcatatctttttatcaaagatcaaataaacactggtcattttaagccaggtcatcttttatcagaaaatcaaacgcgtattaaacttaacatgtctcgtactccaattagagaagcaattagagaagcaatcaaacaattggaaaatgaaggcttactagttcgtcaaggacaaaaaaaatcgttagccatattacattagctgaattaaaagacaattatgatttacgttctctattagagagttatgccttggaaaaaaattttcccaatttagatccacaactggctaatgattatggaataaaattccaagaaattttagcaaaacatgattggcaagcttatcttaaacttgatgaactattccatgtatttttaactgaaaataccggaaatcccacgcttcagcgaaccatcgatcttttacgtactcaaaccaatcgtatgcgttatgccatcgtagacaatgatcgttgtatgaaatcctcggttcaggaaataatggatattatttctgcagttgagaaaaaagatattttgttagcctctaacgctttaaagaagcatataaaaaatgtctatgattgggaacaacaatttttacaaaaataagatcattcatcaaaaacataaatgccttttttgctatattttgttaggataaaaaggatgtatcgtctgtaatatggggaaatgtaatgattaaaaatgcaaaacagattttagcaaaaccttttttcaaccaacatgactaaaactttggttcaagcaatttcagttgggctaactactggagttatagttagcgcatttcgctggattattgatcaaactatgaagttgctttatcaaatttatccgcaaatggcagcccagcgagtactgatcgtaccctacatcttattgatgttcattattgcaataacattaggtaaaataactgcgccttaccttgaacaagtaattggctcaggggtaccacaaatcgaggctgttcttttaaatgaaaataagatgccatggtggtccattctttggcggaaatttattggaggcttattagctatctgtcctggattaatgctaggtcgtgaaggtccttgtattgaaatgggcgcaatggttggtcaaggattagcagaaaaagtatttaaatctaacaaggaaaatttgagaacgctacaataatgcggtgtggctgcaggattggctgccgcctttagcgcgccaatagctggtgcacttttcttggtcgaagaaattacttttgattttaaacctcaaaaagtagtagccgtcttggccgccactttttcagctgacttcgttactattctagcctttggaaacaaaccattcctttatttacccgttaacgattatttacctttaattggtatctttttgggaataatggcatacatttatcaatatgtactactttcgctaaagccatggttcagtaaaattaaaaaaatccctgcagcctatcacagtatcattcctttaattttaattattccagttggtctatttaatgcccacttactcggtggttcacatgtgttaattgataatttattcaatttgaattggaatgtcaaagcctttggatcatgggactttttttactaccgatcttattcttgataattcggtttgtcttttcaatgctttcatatgattcttccgtacctggtggtattttcatgcctatcctagttcttggggcattattgggaataatttgcgccaatattatgataaaattgcagattattttgccaatgtacttccctcatatcctagtgatttccatggccgcatattttggtgcaatagaaaaagcaccattcacagcaattatgctactgactgaaatgattgggactgtccagcaagtattgccaatgattattgttactttcgttgcttactacattctggacattttaggtggaaaaccaatttacgaggacttacgcttgcaaatgaattgtcataaaaatatgtcaataatttaggaaaatgtcccaaaattatttaattattagcggagaatttgctctccgctatttttatacgtattgatggtatttatgagctctcttttgttgctttatgaatgattctcgcttccatggatgtgacattggtggaatccactttttcttggtccttttctttttaggctcttggtctacttctggcgatattttggcattcttaggaatttctttaagcagatatacatgctcatctactgtcgttagcagttgtccatctagggcttcaattaccagacatttagttcctttcatgaagcagactaatttgccatattcatctgttgcttgataaagcttgtttttgaaagaaatagctgagccgctatcaaacactctgccagtgagaacggccaaggtataattgattttgcggtcatcaggagccttttcaaaaacataccaggctttacgactagtctgactgaagttttggttaaagtcaggaacaaacacatcatgcaggtatttatttgcctcgttgattgtcatgattccagccaatcttagttctggcttaaggcgaccttggacggtttggttagctctttcaaccatgcctttggcttgagaaacactagtagtttttagatctacgccaagagttttgcaggcatagccaaattgtgtcagcacatctttatgggcagctttggtttgagcagtctcataattgaatacagtccgattatcagtcttaaagcaaaggggaatgccatattccttaagaatttgctcaaagacgtgatagtagccattcaaagtctcttcccagtcaaaataagccccaacaataatgccagtagcgttgtcgattgcaaggtgcaggtaagccttacgcttaccaaaccagactaagacagaagcatccatctgaatttcttcgccgaagtacttgcatctttcatggcgaggatgagcatctgccaaagctagttgatgatcaactgcagcgctgacttcttgtttgctttgcttagggtgctgcttatgccatttctttttggctaaggcacgcttagtctttctccaaggcttaggggaaagaatatcctgctgcttgagcaggctgtaagctttggtataagagacatgaatgtcctcaaagcgatctaacagctgtacaaaatgttttatattgcagtcttgatatttagtacggtataaggttacaatttgattgttaatttctgtggtgagacaattaacaggtttgcggtctttgttcccatgaacgaaggccgcttttcctttagcttgatactgcttgattctcctgtttatttgtctaacggatattcctagcttcaaggctgctcttttcttattgccgttgtgatctacaagatccttaatgactttgtactgttcatcatatttcatagttaaatcaatcctattcactctaactataacctccaataaaggaaattatgtcatacttactacaattaggacattttcctaagttaacagttaagacattagagactgtcaagaagtttgtgtaaataatctctctcgttgattgacttttttatttatcttttaatcaaaataggattctagggtgtctcgaacttgcccaaatcctttatgaatcctgttaaagtaacggtcattgtaatccattgcctgaactccaataaaggtgtcaagcgactgctcagttggaaattctgttttaggcttggttttccgcttaagcctgttgttaaaggattcaatcatgttagttgagtaaattgaagctctaatagctggcggatagttgtaaaaggttaacagatcaggctcaacctgtctaagatctctaactacgtttttgtaggctttttcccagttttgatagaattcatgcagcacctgtacagccatttctttgtttgactgagtatgaatctgcttgaattcatccagtgcttttttcgatcgtcaacccgcattttggcactgatattacgcatgacgtgtaccaagcagcgttgaaaatgcgctttaggataggactggcagatagcctctttcatgccaactactccgtcagacaagaagagctctacctgttcaaggccgcgactcttgaagcctttgagcatttcgctccaaatctcaatattttcagtaggcgcaatacagtagtcaatcacttctttatgaccattaggtttgataccgatggcgatataaactgcttcgcgctcataagtgacccgcttaagaggaatataggtggcatcgagataaacgcagaagaacttatctgacagatgtcgctgatgatatgcctcaactttgggaatcatttctttagaaatattggaaaccatagctggagaataatagccgccatacattttctcaatcaaatcagcgatttctcgggttgtgacgcccttggaatagagcttgataacagtttgctctaaaacatcagtatgccttttataatctggcatagtgtgttgatgaaactcaccgtttctgtctctaggaactttgatttctatttgtccgaattgcgtatcaaccttgcggtaataagcaccatttctagaatttccggtattccagccatcgcgctcataaggattgtagcctaaaaaggcagtcaattcggattcaagcaggtcattgacagcctgttggagcttttgtctaaataaatcattaattttatcctgattgaatagagcattagccatatctttggtaaaatcattcatgaaggaatctcttttctagtatgtttttcgttcaaatcaatcatacgggaaaaggattcctttttctaatattcaggaaaataaaattaaggaaatattcatccttacacaaaatattttacggtctctatcttaaagtcattgcttcactggagtgatttagcattttcataactaaagcagtattatgattagtctgctgataaaccataaaagctcctgtttttctcattgagtgtgagccaatccaattaaccccaattttaagcccggtctgatgacaaattctataaaaactattttctcttattggaacatcctcacctaatctcctagaacttggaaatagccattcagaagaaaacagcttcgtgtagggatgcttcttttcatattcttgcagccaatcatagtaatcctctaaaacatccctaactggagttaaatataatcggttaggcttttttgtctttttgtcaacgatataagcatttttcttaactctgccattggcttgaaagacatcattctttttcaaagctagaacatcacttacccgtagtaaggttgctttaccggtttgaaatatagcatagtttctttctcccatactagtatcttcacgtaaatgtttcaaaaacttctttaaaattattggatcagtaattggacgagtatctttatgcttcaatttacgtctccttctgtcaatttttatattagtccttgatatacaagtatttcgtcactctatgttgaataattagtctatagctaattatactacataatcaacacaccccaaaattggcatagcagaatgtaagtgtcaatgtttttgcggtagcctttaaaccattagtctaaccttaatttcttaaatatttatatgacttaaatttctgcttagcttgcttaaataactattgccagctacctgtgcggttaatgcgccatgctggatgcctaaatgaacttcatgacgcttctttaagctgtcacgggccgctgcttttaattcctgttcagtcaatacagttatttctgaatcttcaaactcgctgctaagccaaaattccagctctcgattcttgatgcagcttaagatcctaagcatgccttctgctccagattttgaccatttcttgccttgccccttaacacggtaggtatacttgcggtggttgctctcgcagcagccaatggctttagtcacagtcagttttcgtttcttaaacggcttaatatcgtcccaatgacgatcaatataattccttaggcgccccagataatcatgattgagctcggtattcaattcatcaattagtcggctttctgcagtggttaggatagttttaactttgtcatagctgtatttgtattccaaagcagaaatcagcttgccttgcaggtcaggcgcaaaatatagcctttctttgattttcttatttaggtgaaagacatccaagaaatgctcatgacgcttgcatagccctacaatgtcatcgaagtctgttttggcatatccagcaccgccatcggcgttgctaagaattacagtatcagaaagatcataagtattggccaggtactccttggcttcgttcagcgcatcaagtcggcttaaagaaacaaattccttggcattgattcgctttctgcgtttcttgcttatattgacaatgccttcacagacctgatagcgatgaaattccaaccggcttttagtgcctttgatcaccacgccatcgccttcaagatacaaaactgggacctttttcttagtgcctgcggcatcatatcttgaatctgcttcttggcccgctttaatatttttcccggccatttttaccaaattgcccacctgcatatggctaatattaaagccagacaggcaattgactgctagagcagtattgcgataagtggcaacgctgcttacttctaagatgtttttgactgctaaaatactgtagcgcttgtatttgtcaaagcccattaattcatccaagggataccttgcttgtttgcctgggcagacatatcttcttctgacatacctaacttcgccaaaagccatattgattgagcgctcattcttcttatcaatctgatagccctgtgctttaaccttggtaatcatttcatcatcaactttagctaaagccaaggccatgatttccttaatcaggtttaagaagaaacagattatttttctttcacgcttaatataattatcttcagactttataatatttgcgatttcagttacaattgaattcataaaagaccagcttctaatgtgttttttgttcttaacatcagactactggtctttttgtttgagctcaagtccaaattcaaaggacttgggcttttttaattatttattcaacttaccgtaaaaaattatacacttagttattattttgactgtctttttgtctccgtaactgctacactttgcagtagtacatcgtactagtaaaagatatagaaaagagaataaattatgtgtacttctattatttttagtccacaagatcactatttcggccgtaacctcgaccttgaagttacctttggccaacaagtagttgttactccacgcaattacgtcttcaacttccgcaagatgccagagatgaagcaacactacgctatggtcggaattgcgcttgacgctggcgattacccactttactttgacgcagctaatgaaaaaggtttaggcatggccgggcttaactaccctgacaatgctacttactacgatgtagttgacggtaaggacaacattgcttcatttgaattcatcccttggattttggggcaatgtgaaactgttgctgatgctaaaaagttgcttgaaaagatcaacatcgttgacatcaacttctccgacaagatgcaagcatccccacttcactggttaatcgctgataagaccggtgtttcaatcgtggttgaaactgacaaagacgggatgcatgtttacgacaacccagtcggctgtttgactaacaacccacaattctcaagtcaattattcaacttaaacaactacgccgacgtttcaccagcaatgcctaagaacaacttctcttctaaggtagcaatgaacggctacagccgcggccttggttcacgcaacttgccagggggtatggactcagaatcacgctttgttcgtgtagccttcaacaagttcaacgctcctgttggcaagactgaagaagaaaacgttgataattacttccacattttgcattcagttgaacaacaaaaaggccttgaccaagttggtcctgacgcattcgaatacaccatctattctgatggtaccaacctcgacaagggtatcttctactacaccacttacaccaacaagcaaattaacgttgtcgacatgaacaaggaagacttagattctgctaagttaatcacctacgacatgttgactaagccaacttttaaccaccaaaactaaataattaagaaataatgttaattttgtctaaagattagcattatttttatttttacggttaaaatagatgtacttattaaagtaattggggattttcttattaatgaataattattttgtgttgctgctttcggcggtaattttactctggcttatttttaacatcaaaaattcacgtcgttttaacctttttgaccattggttacaccaccagttggtgaaacgtcacgacggttatagttggcaagtcatcgccttcatcaatgatcctaagttaatggtagtttgggatgtgctattagcaggattattactaaatgaagagcgtaatttgactgccctttgggtgttagggaccttgggctttgcggatatttctggtattattttgaagaaattaatccgtcgccagcggccactaatgcattccgacaaggaagatggctacagctttcctagcggccacgtacttggggcgacaaccatggggttaattgttttgcaactatttgccaaggatttaggtaccggcttcgtcattgtggtcgttgcactatgggccatggtgatcttctctcgtttgagtttgaaggcacactacccctctgatgtattaggagcaaccagtttagccatcgtttgcttcagcatttcacaacagctatttttagccatttaaaaagatcacgtttatcgcgtgatctttatttttttattcgtgaaaaccaaccataatgccgccttcttcggcgtagaaactacacaggccatgcatcggtcgaatcgttatttgcgcatcaggatattcggctaaaatcttttccttaattgtggcagcgtctttttcattttcgcagtgatcaataattacttcgccgccgtgataattatcttccttcatgtacttgataatttcacggattgcctttttcattccgcgcgccttagtcagcggttcaagtttaccttctttgctagctgtcccaatcaaattgatcttgagcaaacctgcgattttggctacagctggtgaaacacgaccgtttaaagataaattatgtagtgattgcaaaacaaaaagcaaatgagtctgcattctaaacttagcaattgcttcttctagatctacaaagcgcatttcaccttgcagcattttctcaataccatggactatgattgctagctcaggtcccgcacttcttgaatcaactactataattttactcaagggatgtttttcctcatacattgcttttgcctgaagggctgaagaaaaagtgccactcatcccgctggtcattgtgacgataatcgctttttctgttccttcaagtgcgtcaagccatgcttgaatacttggacaagttgtttggcctgccacattattttggttcatattggacaaaaattccttcatattcaaatcttgattatcaaggtaatccttaccaccaaaagaaattgtcagaggcactacttccaaattacgcgccggatcattattcatattggcacttgagtcaacaattaatttaatattttccattttagattccttattttttgtatttattttaatacatatattatagtcctttgatatagagttttttaggctgctttactaatttttaaaatgtaaaccgctttcatatgtttacaccgtcacaaagttaggctaaaatttgagatgtaaagcggagcaaaaattgttccgtatggtatgaaaaacataccataatttttgaggaggtttattaatgctcaaatcagttattgaaaatgtacacgcacttgaaattttcgactcacgtggtaacccaactgttgaagttcacgttactctttcaaacggtgtcgtaggtaaggctgaagttccatcaggtgcttcaactggtgaaaacgaagctgttgaattacgtgacggtggttcacgtcttggtggtaagggtgtttcaaaggctgttaacaacgttaacactgaaattaacgatgctcttaagggtatggacccatacaaccaaccaaagattgacaagaccatgattgacttagacggtactccaaacaagggtcgtcttggtgccaacgctatcttaggtgtatctatggctgttgcagttgcagctgctaacgatgctcaccttccattgtacagataccttggcggtactgatcttgaaatgccacaaactttccacaacgttatcaacggtggtgaacacgctgacaacggtatcgacattcaagaattcatgatcactccagttgctaagacttcattccgtgacggtttcgaaaagatcgttaacgtataccacaccttgaagaaggttcttgaagacatgggttacgaaactggtttaggtgacgaaggtggtttcgctcctaacatgaagaactcagaagaagctttgaaggctcttcacgaatcaatcatcaaggctggttacaagccaggtgaagatatcgctattgcatgtgactgtgctgcttcatacttctacaacaaggatgatcacaagtaccaccttgaaggtaaggttcttactgatgaagaattagcagattactacgacaagcttttggacgaattcccagaattaatttctatggaagacccatacgacgaaaacgatgttgaaggtatggttaagttcactaagagccacaaggaccgtatccaaatcgttcttgacgacttcatttgtactaaccctgcacttttgactaaggctatcaaggaaggtgctggtaacgcttcacttatcaagttgaaccaaatcggtactgttactgaaacccttgaaactatccgtctttcatgtaagaacggctacaacactatgatttctcaccgttcaggtgaaactggtgataccttcatcgctgacttagctgttgctgttaacggtggtcaacttaagaccggtgctccagctcgttcagaacgtgttgaaaagtacaaccgcttacttgaaatcgaagaagaacttggcgatggtgaacgtcttgccttcttcccagacgatgttgatcacgattaatttcgagttaaccgagtacaatttcaaaaaaagcatgagaattaattttctcatgcttttttgcttactcatttaatctttattttactaattgactaaagattttattcagagatgtatctttaactactttaactacaattgggttgccattcctagactgatcaagcaagataaccggcttatcagatttaaggcagaataagtaagtattgtgccaagatttaaagtcatcattagcaattgccagcacattataatcatattttgccttgcccgttggactgtagcctatcttaattgactttttattcaaaacaaaccgattagttgctagcactccaggataagttgcaccctttttggtctttaaattctttttcccatcataaaactgataggtctgaccggactttttaccccagttattgactgcagtctttaacttggctgtcttagctgtattccaaattacaacagccgactttttagtcctatttttcttattctctttgattttctttttcgagtcttttttaggcttaatcttcttggaacttgaagattgtaccttggcagatttagccttttttacgtttactgttttcttattttgttttacttcaccaatcgtcactgcatctttaccaaaatgtacttgactacaacccgtcaaagtcacagctaaagtgactgcagcaatacctacaaaaatttttctattcataaatagctccatttgttatttcttatgtctattatcacacaaaacctccctctttaaccgctgtttaaataaaaaaagagctaattttcatatcaatgtcattaagttaagacattgacaaattatcgacttggacttttaagatcattcatttgcgatttatcgcatttgaatgctcttttttcatgccaaataaacctaaatcttgtttagaaattaggctacacgatataaataatatacagctgatttgggtttgagatttcttttgtcttttcgtcctggtctgatcggaattgtgtaatgactaatttgaataagaatctttttaaagatttcagttgaagaagaaattatatacatagcctggatgacaaaacatgactgtttgaaattgatcgcatattgatacttgcattttttttgtggtacatatgcttgagcatcaatttgactgactgcgttaaacataatcatgtgggcatagatctccatttcaataaatctatcctgcttggaatgaaactgtacgctacctaaagcatatttcaactttttgaatgaagtttcaatgccccagcgcaaatggtagatttctttgatcctttttaagggataatcggctctatttagattagttagaacaacttcccattcttctttgcctgatttaggatcattaattctaaatttacaggcacgaaattttattgtacataactctccaaagtcccagctgccatctttggtatttttagaccgatattttatatattgacggtaatgatggttaaccaaatgaacgttttctgtagccttatgggtttcataataataattagaggtagtcacccagcaagctatatccttatcacactcttgattaggcaactcagctacttccttaaatgcgccatatcccgttttagtacgtatgacataataacagttaggcaggcgattacaattttcaatcatgttaaagccggtataacctcgatccatagtaactatatatggtccgcaatttagctttttaagcatttgaacggcggctttacgttcatccatctttgacttaggctgaaagatgcagtcttgataagtattatttaacaggtcatagagtgcattaacatgaatttggcaatatggctttcctttatgattgagatttccaacgatattctctgatttaggattccagatttgattaaaatcagacccatcaatggcaaatatacgatatttatgatcaaataactggatattaaataaattctgattaaatacagttagaatatgcttaaaacatgcgggtgaaagctgacctttgcgttggacataagcggaagtactgaccactttatcgttatttttaatagctttttggccaaaagctctaaacaactcactggtcaaatcttttccttgcatattaatagtagttttaatgactgtagctgcatctaaaaaccgcttcctagtgaaggcatgaggatcatcgataaaatcatgaatatgctttccagtatcattgataatttgatcaagacgatctaaaatatttctgtgaagggctttcataattaacaccagctttctggcaataattttgaaggtttaataatttaatcagagggcgaaaaggtaggttcttttcgcctttattttatgcaaaaaaagaaccaaatcataatgattcggttctacagagattagattcaatttgtcaatgtcttaacttaatgacattgattttcatattagctctttttaattaataaattgtaacttgataacgatttgaacgatccgttgcttccggtttttctccaatcttgccaaccggcacgatgacactcgtctgaaaggcaggatcaatccccagctccttctgcaattcgctgtcatcatttaatctagctgcaccgcccattacataaactgagccaagacctaagtctgtcgcctcaagcataatgttctctgcaccacaggatgcatcgcgctcgccaaacatgctgtcttttttagtattaattataaataatactggggcatgataacacgcattatcggtcttcgtctcaatcttgtcgcgcaatgcttcatctttaacaaccaccaagctcattacatctgtctgatgcattccacaaggagtcgtttgaaaagcagcaattgatattggtggtacaacgattaaactcgcaacttggaaagatggcaaattacaaaataaccatgcagttgatactcctaaggatttaaatggcttttatgatgttttaacagcagaaattaataaaatcaaacaagatactaaaatcgaaggagtagccatctcctcacccggtgccgttgatcaaaagactggaatcattggtggctcatctgccttgccttacatccataattttaagattgttgacgaattagaaaaaagatttgaattacctgtatctatcgaaaatgatgctaactctgctgccttaggtgaattagctgctggtgctggaaaaggttgcaattcaatggtcttttttgttatcggtaccggaattggtggagccttaattattaatcaaaaagtttggcatggggctcatctttttggcggtgaatttggctacatgctaatgggaacacatactttaagcgaacttgcttctccggttacaatggctaaccattataatgaaagaaccggtaaaaatcttgatggtaaaaccgtttttgccttagctgatcaagatgatcccgttgcaagcgatgtccgctctactctaattcattccctggcagttgccatctacaatattcaacacagctttgatcctgaaaaaatagttctaggtgggggcatttctaacaaccctgagttaattcctctcctaaacaaagaaattgatcaaattgaagcaaattcagacttacataccttaaagcctgtcattgccctctgttcactaaaaagcgatgccaacttgcgtggagcagttgctaatttcgagcaaaagcatcaaaattaatcaaactataattgttattttatctaaaataatctttctacaagcctatataaatgggcttttttctttatgtaaattaaaagtatagatttttaactaattagatctttattttcattattaatctgatatacttatttatgtagataaatgaaagtgcttacagagggagaggagaaatagatgtctgaaaagcgcaaattgccatccacctttttctggggcaactcagtttcaagtatgcaaactgaaggtgcttggaatgaagatggcaaaggtctctccgtttatgatgttcgccctgctactgacaaaacaactgattggcatgtagcaattgatgaatatcatagatacgatgaagacctcgacttaatgaaagatatgcacctgaacatgtatcgaattcaaatttcatggtcacgtgtatgtcctgatggcgacggcgacttcaacgaaaaaggtatcgacttttatgatcgtttaatcaatgcgatgcttaaacgtggcattgaaccaatgatttgtctttaccatttcgacatgccactgaatttagctaagaaatacaatggctttatgtcacggcatgtagttgacgcgttcgttcgctttggtaaaaagatgattgatcacttcggtgaccgggtaaagtattggatcgttttcaatgaacataacctttacttccaagatgaagttttcaatatttcaggttatgaacatggtgaaaagagcttagatgatatgtacaccatcttccaccatacgatgatgtgtcacattcaattagctaattacatccacgaaaattattctgatgtaaaaattggcggtatgcttgcctaccaacaaatttatccagctaccagcaaacctaaagatatttggtctgccaaacaagttcaagaatttttaaacttcaatatttatgatgctgatactggtcgtggttactcaccagaagtaatgcaatatgccaagaaccatcacatcaacatggatatcactgatgaagacaaagaaattatgaaaaaagctaaagctgacttccttgccttttcatattactcatcatgggtattatcaagtgacaaaattcctgccggtgaggctcctaaccgctaccttaaccaaggcggcgtagaagccaaatacgtaaaaactaacgattggggctgggcaatcgatccacttggcttcagaaatgcaatcactaccatgtataactactaccgtattcctattttccctattgaaaatggtattggtcttaaagaaacatgggatggcaagaatatgatcgaagatgatgagagaattgcatatcatcgcgatcacattaaagccatgaaggatgccatttttgatgatggtgctaaggttcttggctatctcggctggggcttaatcgatattccaagttctcatgctgatatggaaaagcgctacggtgctatttacgtcaacagatcaaatcatgacttaaaagacttaaaacgtgtacctaagaaatcattttactggttccaaaaggtacttagtgataatggagatgaattataatggctgatcaaaaacaatctggatttggcttatgggttaaccaacacataatgccaccaatcatgaaattcgttaacactaaagcaattaccgctctgcaaaatggtatggtttactcactgccattcattattatcggttctattttcctgattttaggaaatattcctattaagtccgttgcagatgcaattaatgcttctggttggggtgctatttttgcacaagccaacaacaccactttccaaatgatgggtttgtgggctgctattggtattgcttatgtttatgttaaaaacgaaaattacgaacctttagcaccaggtcttacttcagcagctgctttcttaatgctacaaaacttaagcattgataatccattaaaggctgctttaacttcaggtcttactgatggttcaatgacaggtaaagtagtaacagaaaacattgataaattgcctcatgctttacaatcattcttagaatcacctgttactggtgtaattaacactaagtggcttggtggtgacggtatgatcgctgcaattatcgttggtttacttgttggttggatctacacaatgattatgaaggcaggttggactattaagatgccagctcaagttccacctgcagtatctaaccaatttactgctatgattccttcaggtgttatccttacaggttcaatgttgatttatgctgcatttaatgcatttgcacacactgacttcttaaactggatctacaatactttacaaattcctcttcaaggtatttcagactcattcggtggtgctatcgctattggattccttgtaccattcttctggttcttcggtgtccacggtggtttgatcatgggatcacttgttgctccaatgcttcaagccaacactgctgacaacgctagattattcgctgaaggcaaacttactattgctcaaggtgctcacgttgttactaatgaattctacaacaacttcattaacttaactggttctggtattactattggtttaattatcttcactttagttgctgctaaatcagttcaattgaagtcaattggtaagttagaattagtacctggtatcttcaacattaacgaaccattcctcttcggtttgccaatcgttatgaacccaatgcttgctgtacctttcttcttaactccattagtagttgctgcttcaacttacttggttatcaaaactggtattgttccaccacttaatggtgttgccgctccatggactacaccagctgttatctctggtttcttaattggtggctggaagatggccatctggcaggcatgtacgttacttatttcaacagctatttactggccatttgctagaaaatacgataaggtattgctcgctaaagaaatgaaagaagctaaacaagaagcaaataagtaaaaatatgctaatcatatgaaattaaatatagttttagaaagagagatgccattaatgcttgtaaaatagtaaaaatgacgtctcttttttgataaagtatagacttttgttttaaaatagaagtataaaagtaaagaagatgaaaaaacatggcaaaggcaaaatatttagaggtcgcaagtgaattaaaaaaacgtattgaaaatggtgtttacagtaagcaagagcccttacctgatcaagaggcattcgctaaagaatttgacgttagtcgtctgactgtaaaaaaggctttcgatggtttggagcgacaaggactagtttataaacaatctggcttaggaacatttgtcgcaggcgaagttccaattaaatctgatattgattctcccgtcaatgcttttactggtttaagaaacttactaggaaaaaacgaagttacaagtaaggtgctacacttctctgttgagtttcccgatgagcaaatacaaaagaacctcgatctaaagcgaaatgaaccagtctataacattgttcgacttagaatctatgatgatcaaccctacattattgagcatacttatatgccaattaagctggttcccgaattagatgagaagattctacatgcatcaatctataattacatccatcaaaaattgcatttaaagtttggtcatgcttatcgaaaaattcgtgctgctaaacccaacgaatacgataaaaaattcttagatgctaaagatgatgacccaatgcttgagctagaacagatcatttggcttacaaatgggcaaccaatcgaatattcaaccagtagaaatcgatacgatactcgcgattacgttttattagataataaccgattttaggaggtattttatggcattctcaaaaaatttcacttggggtggcgctactgctgctaaccaatatgaaggtggctatgatgaaggtggcaaaggtttaaatgctgttgacgttttaactaatggctcagcaactgaaccgcgtaaggtaacttggaaaaagcctaatggtgaaactggagctacgcctctagtttgggggcaagaatttagtctacctgaaggtgctgttccaactattttagacggttactactaccccagccaccaaggaacggacttttatcaccactatcaagaagatattaaattaatggccgacatgggctttgatgttttcaggctatcaatgaactggtccagaattttgccaaatggtgatgacgaacaacctaatgaagacggattagccttttacaataaagtatttgatgaatgtgctaagtatggcattgaaccactggtaactttatcccactatgagacacctctttctttaattacccactacggtggctggaaagatcgccatttaatcgatgctttcgttcactactctgatatcgtgatgaagcactacaaaggcaaagttagatattggcttacttttaacgaaatcaacgccatggacatggctccttatatgggtggcggtttaatcgatggtagcgaacaaaatcgtgctcaaggtgctcacaatcaattcgtagctagcgctaaggtagttaaattagcccatgaaattgaccccaacaaccgtgttggccaaatgctagcttattctgcctactacccttacacttgtgatcctgctgatcaacttaaagtgatggaagccaagcaagagatgctcttctacagtgatgttcaaactggcggccgctaccctaactatcgtcttaagaaatatgaacgtgatgggattaagcttaatgatacaccagaagattatgaattaatcgctaaatatccagcagatttcttaagtttttcttgctatacttcaaacgttttaaccactcatgaagctgatgctaaagctaacggtaatgtttctgctggtggtgtagttaacccatatcttgagagtaatgcttggggctgggcaactgatccagatgttttacgaatcggcctaaatgagctctgggatcgttaccacaagcctctatgggtagtagaaaatggtttaggttctgctgacacccttgaaaaagatggatcaattcatgataactatcgtattgattacttacgagaccagatcaaatcaatgcgggatgctgtcacaattgatggtgtcgatttgatgggatacactacctggtcagcaatcgatcttgtctcaaatgggactggtgagatgaagaaacgctatggttttgtctatattgatcgtgatgaccgtggcaatggctcactcaagcgttatcctaaagattcattctactggtataaaaaagttatcacctcaaatggtgaggatttagactaaaacttttatttataaatagagcctagctaaaaagtgctagactctatttttctaaaaagatatgatgaaagcataagtaatatagatgagagaaggaaaagtatgattacaattactaaacaattcaacttcaaggctaaggacttctttgattaccttgaagaacaattaattcctgctattaaaaaagctcgtggtaatgacatgccggtaacgcttgctaaaggtactaaatacgaggtggatggtgcccaagtagaattaaccgattacgaaagaaacaaggtctatggggctcattttaagacagatcgaatggaattagtgattaaatatgtcactgaggataacgatcaaggcgtaaaaatcaccttttctgaagacatgcttagctttgaccgcgagaaacacggcaaactccaaactatgttttacaatttccaattaaagatgggcgcaaagaaagaattaagacgaatgggtgacaatgttttagctaatattgcagcttaaaatcgccatctcagcagcaaaaagaccataactacttctaattgtgttgtagttatggtcttttttttgttcaaattaacaatcttatctatatcaaaattaatctattagttcttagtagcgtcagcctgttccttcttcaataagacattgtcatagtgcttgatgaatgggaaccaaactaagaaagcaacaagtgcacaaataattgaaagcacggcaccttgccagctagtagttgcaagataaccactcaaacccactggagttggccatggttgttgcacaataatcttaggtactaaatgtgaagttactgcgatgtaacccaccaagccagaagcaagtggagcacaaatgaatggcacaagcaagttaatgttataaacgattggcaaaccgaataacaatggttcattaatattaaaaatggcaggaaccaattcaaccttaccaatttctttcaattgagctgaacgagaaccaaaggctaaccagattgccatccctaaagtagcacctgaaccaccaataattacaaaggagttcatcggatcacctgcaaagaagtgattagcaccatttacattagcagccatattagctaaaacaattggagtatagaatgagctcatgatagtagcaccatgaattccgaaccaccataagaagtgaatcaagaaaatgataatcaaaaagccccaccaagtatcagcaattgcactgatgaatgagaatggaatgtaaagaacttggaaaatatcagttcctaaagttaccaaaattagttcaatcaatgcaactacaacagcaatacaaaagcctgggatcaaagcgctaaatgagttagaaacaccagatggaactgatgcaggcatttttattctccagttgtgcttaacagtgtaacggtagatctgaactgtaagccatgcaattactaatccagtgaagataccaacggcagcaattctggtaataccatttgttgaggcttcataaccgcctgccaccattttagtcttagtaaatgtagtaataaattgaacagcaccatttttccaaataagttccggaacagtaatgaagaatgccattaagaacatcatcaaaccgttcatcggtaccaaatcaattttctcttctcttcgataaatatccgtgtatgaataagcaaaagtacctgcaaatactaatgccaagatacccatagtcgagttgtaaactacttggaataagccactaaagcggcctaaagtattcgcataaaatgcggcaaatcctggaattggaaatgcttgaggcagcacattcaaaattaagaaaactgccccgataattgaaaatgaaataacgctataaccagcgtccataatagctctaacaaaacgtgaacctgcaaatttacctgcttttgcagctagcgcatctttaaaagagccagattttgaatcagccatatttctttcccccaatattctgaaacatcattaaatctgaacaaccttattatagcgaaagcgttttctaatgtaaacgtttttattgatatacgatatattttggttttttaaaatgtatatttttgaaattacttctaataaaaaaagttcatgtaactttacatgaactattgttggtgcttcttaaaagtctctatcaccttgtgataacgatcttgatcattcataatttgatgaattcggtattcgctccaaacacacaataaaatgccagctaaaaacaaagttgtcataaagaacataatactttgattttcgatgaatgggaataaatacttacccaatggcaaaaacgtcaatattataaaaagcaaatttaaagctgcttgtacttcaagataaactctgctaattgggacctctcgttttcgattatgcattttagttaactgctcaatcgaagcaatcccactataaattgtcataattgccgaaacaataatgccaagaacactatgataatttacatcaataattagccacatcaagttggtaaaaaagaagatagtaataatatatctaattaacttaaacttcccacactaaataagccagtaatctcttgatcttgcttggctttaggcttctatattatttttgctagttttctttaacaatttttgcatgtatttgggtaaacgattgataaagtcagccgtgaattcagctatttgtgcttcactggcatgaaagacttgctttacgctggccagcattgcatcagtaatcaattgcaaggaatggctaaaagtaatgtccgccagctcatcaatcatgcaatagaacagctcgcctagcgtgcgttcatcttcatcgtcccgcttggcaactgacataagcatgtagcgagtaaaaactatggcaacatgagcggtcaaagcatcgtaagacaggccatgatattccgtacttagttttagataacttttgcaagttttgaaaaaaacctcaatatcccaacgcttgccgtagttgcggataatttcatcttcgctaagcgacatgtcggtacaaatgattgccagccaatccttgcgattggcacgatttctaacgcagacaatccgtgcatctattttagcaccgtctttgtcctggcgtccgactttgactgggattgacagcaggtagcgagaacggccgcatcgctttttacagctgcgataaatctgtttgatgtttttgcgttctccctcaaattcatatttgattttggagctaaccttaaccatggcaatcacatccagcttcctttgcttgagctggacgatttgatgtggatttgagaaccagctgtcaaacagcacgtacttggcttgatgacctgctttcatagcttggtcgattaaattaaccatcacgtctgtgcctttagtccgggcaagcatacgtctttggccagcaatggtgcgctgatcaaaaactttattttcgccaatcatattctgtagcttctgagaagacagcagcactgaattgattggcatgaaagaagctccatcagtccagcccagggtcatcatgcgaaaacctttcttgtaagtcattgatacatggtcaaaaactttggcgactaattctgttttcttgaagccggtcctagagaagtaggaatcatcgacaacaaagcaatcagcccgtttttctgaagtcaaagatcgcaagtggttattaatgatttgcgcagacagaagtgtggtgaagtggagccaattgacgtgaacgttgcgcataaaacggtaatatgagttcttggaaaaattttcttgaaaatgatccattttcagctgcatatataagctgcggtcacgaaagacattgcttaaaacgtaaagaaacaagctgaacaggctaatgcctttttccttgcggaagccacattttctcaacagcttgatcacctgaaacttcttgatgaagctgatgattgagtttgaaaatagttgttcattttgttggtcaggagatggtaaaatagacattggcacaagcctttcatgcaaataaattatgttttggtcaatataattatagcaatgaaaaggacttgtgccttttatatttgtcaaaacacgcagaatcacaatgaaacaagcaattttgcgtgtgggaagtttaagtaattaacaaatatcgactaaaatacatatacttaatgctatcttcatgtcttttcttagccgtctctgtctgttcttgagactgtaaaatagtttgtgtaaggatgaatgattccttaaatttatttctttaaacattagaaaaaggagttcctttctcgtatgattggtttgaacaaaaaaacacatacagaaagaagaactccttcatgaatgattttaccaaagattttgctcaagctctattcaatccagacaaaataaatgatttattgcgcaaagagctacaacaggctgttaataacttgctagaagctgagttgactgcctttctaggctatgatccctatgccagaaatggctggaatactggcaattctagaaatggtgcttatttccgcaaggttgatacccagtttggaccaattgaagtgcaagtgcctcgagaccgcaacggtcagtttcatcagcacacgctgcctgactacaagcagcactctgatgttttggaaagcacgattatcaagctctactccaaaggcgtaactaccagagaaatcgctgacttgattgagaaaatgtatggcagtcattatagtccagctcaagtatcaaatatttccaagcagatgctccccaaggttgaggcttatcacaagcgcaagctaagcgacaagtttttctgtgtctatttggatgcgacataccttcctttgcgccgagaaacgtttgagcgtgaagcagtctatattgccattggcatcaagcctaatgggcacaaggaggtcattgactactgcattgcacctagcgagaacattgaagtctggacagatatgcttcaaaacatgaaatcccgaggcttaaagcaagttgagctttttctttctgatggtgttgttggcatgaaaacagccttggccaggacttatcctaaagctcattttcaacgctgcttggttcatgtcatgcgcaatatctgtgctaaagtccgggtggatgaccgcgaaaagatcatgaacgaattcaagcagatacatcaacagacaagcaaaaaagaagctgcagctgtcttgcacaaattctatgccagatggaataaagcttatagcaatgtcatcaaaggtttgaaggaaattgagcccgatctgctggtcttctacaattatcccaaacaaatcagagcttcaatttattcaaccaatatgattgaatcctttaacaacgtcatcaagcgtaaagctaagcctaaggcagaatttccaactgaacagtcgcttgatgcatttattggcatccaggcaatgagctacaatgaccgctatttcaaccgaattcataaaggctttggtcaggttcaggataccttagaatcttattttgaataaataattaaaaaatcaatttgcgagaaagaactatttacacaaaagatttgacagtttcctgttcttttttaatgttttgtttattcatttttcttcgtctcatttcttgcctaataattatatttaagcacaaatcaggcaaaaattatcgaaaaaaataactcccgcattcgcaggagttattttcattttcagcgattacttatcttcttttttaagagagccagattcatacagcttttcgtaaagatcaaccatttctccagctaaatctctaaaagtgatagcattcatcaagtgatcttgagagtgaactaccaacaaagttacatgcatgtggtcgccttgagcttctttagttaacatgccggtttgtgaattgtgagcttcaagaagtgatttgtcactttccttcaacttttcacgagcacctgcaatatcgccttttttagccaagcgaattgcttcaaaggctaaactctttgcattaccaccattggcaattaaacccatagcagccattaaagtttcttgttctttttgttctggagttttcttttcttctgccataaaatctgtctcactttccttagctattttagctaattaattattcacctttgatcaatttttcagcttgtgccaaaacgttagcaccattcatcatgccgtaatcttgcatattaattacgtctaaaggaatgtccttaccgtctttacccttacctttaaccttgttttcgaagtcacccttcatgtaacttacttgaggcccaagaagtacacaatcgatttcttgttgtgccatcttgtcatcagcttctgatgctgggcaagcaaagatttctgcatcaataccttgttccttagcagcagcttgcatcttagttactaagagtgaagtactcataccagcactacaatttaacatgatagtttgttcagccataataaatttcctcctgaaatttttattttatagtttaattagcttttattgatctacaccaattattataaaacgctttcattgatttgtaaacaaaaaattatacatgcacggcttagtcttaccatgcttatataatcatctcaagcaaaagatatatacttttatctcctgacagccaatattatatatcctttgtaagcattttcaaatacatatcctcagcatgttaagcaaagtcctttgcatacgtatgctttaacataaaaaataaattattttttagcaaacgctttcaattaataaatgaatactgttagaatgtatatgtaatttattcctttacaatagaaaggaggcagaatcttgagtcgctatcaagacattgccaatgatatagaaaaagatattattgagaaaaaatatacaagaaaactacctgaacaatttgaactggcccaaaaatatcaaactagtcgggtcacaatcgttcacgccttaaagattttacaaaataaaaaattaatacggactgtcaagggacatgggacctttattacaagcaagtctattcccgacatttttcttaattctgatgtcaatgagcataccggctttactcgtcacgtcaataatgctctcgcaataaccagtaatgtgattgcctttaacattcgcaaacctagtattagtgaacgaaaagctctttgtttagaaaaagatgacgaagtttacgatattattagacaacgaattttaaataaaaagccagctaaattagaatataccgtgatgccagttagccgcatccccggtatcaccctagatattttgcacaagtcaatctactcttatattcaaaatgatcttgggcttaagatcggccgagcagatcgcattattacagctgaaaaatctgatgcatatgatatgaagtatcttgaatgtaaaaatgatgatcctgttttatgtattcagcaaaaggcattccttgaagacggacgaccttttgaaatttctgagtcacgtaatcgctatgaccgtggtgatttaacagttaatggcaaataagtgttacttgattaaaaaaatcaattatggcaaaatggctctcgtaagcgtttccaattacatacaagaaagtgaggaaaaatttaatgtattcagcaaaaatgcctaaaaactttttatggggtggtgcagttgctgcccaccaacttgaaggtgcttggaaagaaggaggaaaaggtacttctgttgctgatgtaatgaccgttggttcagctactaaaccacgtgaaattactgacggtgttcttgaaggcaagaattatcctaatcactcagccattgatttttatcatcactacaaagaagacattaaattaatggctgaaatgggcttcaaggcttttagaacttcaattgcctggacaagaatctttcctaatggtgatgaagccgaacctaacgaggaaggtttaaagttctatgacgatttatttgatacttgtcatgaatacggcattgaacccgttattaccctctcccactttgaaatgccttttaatttagctaaaaactatggtggttttaccaaccgaaaagtaatcgatttcttcgttcgttttgcagaagtttgcttcaaacgctacaagaataaagttaagtactggatgacctttaacgaaattgataatcagtctgcattcaataatgatttcttgatggctactaactcaggcattttgttcaaagatggcatgactgacagagataaagaagccgccatgtatcaagcaggtcactatgaattggttgcttcagccttagctgttaagattggtcacaagattaatcctgatttccaaatcggttgtatgattaactactcacctgtacgtccgctcactccatcaagtgatgatgtccttttagctgataaatgggagcaacgccgtgactggttctcagatgtacatgtttttggtgaatatccaaatgcagttgaatcctacattgaacgaaatggctatcgtcctgatataactgatgaagataaaattgtcctaaaggaaggcaccgttgactacgttggcttctcctactatcagactactaccgtttctagcgaaaaagttaaacctgatgaattaactgatttggctaaagctgttgctaagaatccaaccttaaagcgtagcgattgggactgggaaattgacccagaaggcttaagaattgcattaaatcaattgcaagaccgttatcacaaaccattattcatcgttgaaaatggtcttggagcttacgataaagttgaaactgatgggtcaattcacgatgactacagaattgactacttaagaaaccatatttcagaaatggaaaaggcagttgaactcgatggagttaacttaatgggctacttaccatggggctgtattgaccttgtttctgcaggtactggtcaaatggataagcgctacggctttatctacgttgataaaaacgatgctggtgaaggtacattggctcgttcacgtaaggactcattcttctggtacaagaaagttatcgaatctaacggtcaagacttagattaattaaactattaatagcaaaaaactgatattcagactttaatcattgaatatcagttttttattttataaatatttactgccttctttaatactcaatttagctaaatgctctcgatgcagttcaatgaagttacgcacccaatctggattggtcttagagtaatcacgcaaagcccagccaattgccttgttgataaaaaactcctgactatcaagattattttcaataattttttgtaataacgcggtgttcatcttctttttacgcaataattgatgctcaatcgcgacccttcttacccagaaatctggatcttgcgaccacttgagcattagatcgtctactcgattatccgttaagccaacatagccataaattttgattaatgagtcaatcgtatcccaccattgctttgttctaacaaaacgctcaattttagctaaatcatcaaaaacaatatactttttcattgccaataaataatcacaggcaaaatattgcaattcgcgttgttcttcatcccatgcctggtctagcaacttccagtcaacttcttttttcttcttttcatctttcaaaaaattatgataaatcgccctacgttctggtgtttgtaggccatagaatagaaattgattttgcatgtaaccaacaagatgattggccttttcttcatttgcccgagcgctaaattctttttttaatgtttcaatattcatgttttttattttagcacaaaaagaggtctccaaattctagagacgcttatcgtaaaaataatcatctacccgatcatttcaactaaaagcttggtagaataaaagtatctatattaagaaaggcataaacaatgaaacaaatttattttaaccatgatggtaatatcgatgatttagtatcttatctgctcttactacaagcaccagatatcaaacttttaggtgttggtgcaattgatgcagacggctacattgatcctagtgttgaagcatgtcgcaaaatgaccgatctttttaacttacgtggtgatgatttgactattgctcgttccaactcacgtgcagtcaaccaatttcctcacgagtggcggatggcaacttattcatttaattatcttcccatgctcaatgaaagtggcaagattaatacgcagaaggcaaaacttcctgctcatttagacatggtcgaaaaaattaaagaagcagacgagcctatcgttttagttatgacaggtccgttaactgacctggctcgcgctttagatgtcgatcccgacattgagaaaaacattgaaaaactttattggatgggtggttctcttgatgggcacggcaacgttgctatggttaacgctgacggtagtcaagaatggaactcgttttgggatccatacgcagttaaacgcgtatttgaatcaaatattccaattcagatggtgggattagaaagtacggaagaattaccacttaacgatgagttgcgtcagcactgggcaagtttacgtaaatatcctgcaatggacttgataggacaaggctatagtctaatcgtatctataccatcagccgaactctacctttgggatgtgctaactacaatcagcgcactatatccagaagttgttgaaaccgaaacggctaaagcaagagtcatcactgatgggttaagtgcaggaagctttgtacgggatcctaaaggaagagaagtaactcttgttactaaagccaataaggatctcttcttccaaaagatggatgaaattttagaaagaaaataacaaaaaagaggctcacgcctcttttttatattgccttaattgactttttgtaaagaattaccgcaatccaaactgaaatgaatgatggcagtatcgcaactacaaacaaatttggatctaaaaaattacctactctgatgaagtttgtaattgaagtaatatgttttatgttactaaatatcgcttgataaactgtaacatatattaacgaccactgaatataatattctaccaaagtgagtgtagttgtcgaaaacttaaaaattttgctagccagtcgcatcccccaataaacaaaaacacctgaaagtacaacaaatgctgctaacagcaaaaacaagtttcccaaattaacatggtcccattgactcatgatcaaatacgcaattaccatgaaaattaagaaattaattgttgaacaacacagctgaatgacaaataaaattgcagcctttaagaattcaaacttgtgctctgatctgaataacaaaaatactactagaataattacagcaatgatgaaatatgtagtaacgtgcacagttatctcctactttgcctgttttaaggcttcgcttgtagcctctttaaccccattggaagtaaatgttgcaccagtaacagcgtcgatatcagcagattgtttatccaaaatttcctgctttaatgttttttctgctttttgaccatactgcggcgtttccgtagataaatctaaatctacagttgaaattttattatcagctacagttaatgtcacacctacaaagcctgccatgccgcgtgcacgggcactatatgttccttcttttaacatcctttttcctcttttttataaaacaaaaatactgctatataataaatataacagtattcctaaaaaaagccacaaagatattgtgtttagtatatcatattgatatactatttcttgggtcttgattgtttttataagtccttattatgacccatgtgcaggtagtagaatccccttctacctgttttattataccacaataaataactgatgttatatcaaatcctaagttcttttgaaaattttctcaaaagggcttttttcttgcactatcctttataagttacgttaaaattgaaatggaattataaagttatatttaaagaaggtaaagcatgtatccagataataatattcttacatatttaaaatggcgtggtgacgttgacttctcaacatcgccttttaatgatattgatgcacttgttttatctattttttcttatcttgaattaccaggtattgttaaaagtaacggaacgacaattagtttagaaaaggctgccaagctctattttgcagatgatcatcctcgttatgataatttgcaataccaagaactatttaaattaatggctcatgcagaccgctttaaaaatgcaaaactgtcgtattttattagtacgttaactgaacatactcaatttagtgcaatcaaaattgaactaactgatgggaccaactttattgcttttcgtgggactgacgattcactaattggctggaaagaagattttgaaattagttttaaaatcactgtagcccaacaacaagcagtaaaattgctcgaaactattctcaaagctgatgatcaagattattacttaggcggtcactcaaaaggtggcaatttagctgaatatgctgccattaatattgagcccaaattaagaaaaagaatcaaacgtatttatacctttgattcacctggaattgcagaagaaattggtgctcagctccctaataagtatttgcaaaatactctacgccgctttgtgccagactttagcgtcatcggtcgcttatttgagtcgaaaaatattccagccactattgttgatagtactcgcaagggactaagccaacacgatgctttttcctggcaaataatcggttctaacttcgacaccagacgccaccgcaatgctcaatctcaagtatataatcaactaatcaatcaatggattggtaacgccaccctagaagaacgtgagtctttaactaatgacctcttctctgctttaagctctagcggcgcaactaagatcaacgaacttgataaaaatggttttggcggttttggtgcaattttgttttcactggctgattcatctcggcgaacccgtttcgtctttggttcattattttccagcatttggcagacgatcaagagccagcaactgaccaaagcgcttttctcaacagacacaattgttggttgggtgctggtagtattaggaatcattagtctaactctaccccaatatgcagtgcgcgcttttggcgccctagttgccttcacggggattggtttcagtgttcaccaaattttaacaacggcaaaatctagtctaaaagaccgacaaaaaaacttctttattatttcgtatttagtagtttttgctttatcaaccgcgttaatttctaataaccgtctactaattttcttagctcactacttcttaggactattcttaattatctattcctacattcgaattaggcaactagtctttcgtaaattacccggaatttttcagattactattgtagcgatcgaggcattaattgcttttgctttaggaattattgtagtggttaaccctagtgcctttaatcggagagcaattattattatcggtattttgctaattgcttacggcttcttcaagttagttggcgaattatttggccagcgcagcaaaatgcccaaaaatcatcgttaaaaaaagcttgttaacttcaatatcagttaacaagcttttttcttagcccttaataaaggtattagcctttatatgctttaaaatgttatacccgattgcacgaatatgatttttactaccataagtttgattcaaaaacattacaattccattctgattatcagtagtcagttgcatccagttaacaaagtgggtatcaccaaaattgccataagcgacttttaaagtttgattctttttcagataaaaaccacctgagtaagtattaaccttagaacttaaatgaccaagataatggaactgttttttagtcagaatcttgccattttgcataccagattggattttataataatcattagccgttgaaaatagattcccagcaccaggcaattgagaaacaacattacgattagcataggcactagcactgtaatttttaccaccagaataaagatatgaaatcgcatcagtctttgaccgcggaatttgttgataaatataggtttgcttcaacttcaatgatcgaataacccgctgtttcacattagcagcataagactttcccgttactttactgataatgcctgccagcaaaacatagttagcattattgtaattaaatttactgcgtcccgtattttctcgtgcattggcttgggcaattgtccaattgatcgcgccattttcagaaaaattaactccatgattagattctgttccaattacgttaattcctgaggtatgtgtcattaactgccccaccgtaatttggtttgcatgcttcaaatttggataccagcgtgaaatcttagtattctgattgaatttcttctggtagattaactgtgtaattattgcagcagtaaccatcttttgcaaagaaccaactggataaagcaattttgtattgccattttcagtcgtttgctgtaataaccgtagcctaagctaacacgttgagcatgcccattttttacaatttcaatgcttcctcgtaaatgatgctttttcatcatcttaagcgtatattgccgtagttgcttatttgaataactcttcgcctgcacagcatgatttgacattatcaaacacgatgaacaaaataaaatgaaagctatcccgaacttttttagtgtcttcaaaatttcaatctccttttaatcctgaactattctaccacaatcaaaaagcgcaaaatcacttttaatcatggtttgcgctttcatttttattttttaaaatttttatagtaagttcatcttaactaggtattccgcattttcaaccgtattccatgcagcacccttaagcaaattatcggctacaatccacatgttgaaggcacccttattttcataatcagggcgaatgcggccaacaaaagtttctcgcttacctgttgcattaattggttgcggataaatttgatgtttaatatcatcttccaaaacattacctggaaaggcagcaactgcatctttaatatcttgtgccgttgcagtctcatcttcaagagtaaagtagacactttccccatgagaaattggcacaggaaccctaacacaagttgcagttaccttgatatctttggcattcatgtcatttagcatgatcttctttgtttcatgaatcatcttccattcttcatgagaatagccactatcttctaaaacatcaatttgaggtaacaaattaaaggctaatgggtaatgctttttgtctcctttagtaggtaaaatatgagcgtctgcttgcatgtctttaccatcaaggtagtcttgactttccttttttaattcatcaattgctgcttgtcctgctcctgaagcagcttgataagtggaaacgataatttgtttcaaaccaaattttcttcgaactggttccaaagccattaccatttgaattgttgaacaatttggattggcaatgatgccgtgatgctttttcaatgcttctggattaacttcaggtacaaccagtggtacatctggttccattctaaatgctgatgtattatcaacacagacagcaccacgcttaacggcttccggcagaaacttctttgacactgcaccaccagctgaggaaagtactaaatctacaccatcaaatgattctggtgtagtttcttcaactttcaaatcttgatccttaaattttaaaactgtacctgctgaacgtgaggatgcgagtagctttaagcttttaactggaatcgttgattgttccaattgttcgatcattcttcttcccacggcaccagtagcacctagaattgcaacattatattctttcaccattatttttctcctcgcaaaaaattcttcattctttccatcgcttcatgtagattttcatcactggaagcatatgacattctaacgtacccttctccaccaggaccaaaagcactacctggagtaataccgacttttgcttcaaatgctaaatccagtgcaaattgcatatcatttttaccatatttagctggaatcttagcgaaaatataaaatgctccctgtggtttaactgcttgcatccccatcttagctaattcatccaacacaaaatcgcgccttctttgatatattttgcggtatttttctggatcatccaatccatgctccaaagcttcagtcgctgcagcttgagaagagtcagttgtagtcgtaaccattaaaccatggactttaccaatttgttccataatttttgccggaccagctacataacccagtcggtatcctgtcattgcatgtgacttagataatccagaaatataaattgcccgttcaggaatcacacttgcaattgaaaaatgcttaacgccataagttaaagtactgtaaatttcatcagtaattacgtacagattgtgtgcttttatcacttcagctaatgccctaatttcgctttcggtgtattcaactcctgtcggattaactgggtagtttaagataaccgccttgatattagattcttccttaagtgtactttctaatctttctggcgttaatttaaagttatcttctgacgtgttcattaatacataatctgcatctgctaaagttgcaactggccaatatagtgaaaataccggtgtaggaatagcaaccttatcaccccgattggtaattgaaaatagtgtcgcattaattgcttcagttgcgccaactgtaaccacaatttcagtttctggatcgtaaactactccagttgcttttttcaaataattgctaattgcttgcctaagttccaattttcccttttgtggcgcatagtgtgaatcattatttcgaatactttcaattgcagctgttttaacatgctcaggtgtattcatatcaggctcacccaaagtcagcttgataattccaggaatggttgaaactttattatcaaaaatcctaatccccgaagccttaacagattgaatcttcttacttaaagctaagtcatttgctaattctggcataatttttcctcttataaaatattctctaagccaataactagttcagttaattgatctactttttctaaagcaactttaaccccactcataaaggaatcacgatcaaatgaatcctgtctaatggttaaagcttcgccaggtccaccaaataaaacttgctcatgtgcaatatagccaggtaagcgtactgaatggattttaattccttgataatctccaccgcgaacattggctaaagtctcagtttcatcaggcgcagtttgatgttcaggacgattttgcgcgatcatttttgcagtagctaaagcagtgcctgaaggtgcatcttttttatctgcatgatgcatttcaataatttcaacatcagggaaatacttagcagcttcttcagcaaacttcattaataaaactgccgacattccaaaattaggtgcgattaagccacctaatttttcctttttggctagttcaatcaaagttgcttcttgatcatcactcaagccagtagttcccacaataggtttaatttgatgcgttaaagcaaaataaacattgtcatagacagctgcgggagtagtaaaatcaatccaaatatctgcagcatggtcaggaatttgacttaattggttaaaaatttgggctgttttaggtaaatgatatctttcaggctcatttactgcctttggagcaaatccagccaccaattcaaaattgggcagctgattaactaaactaacagccttttgccccattgcgccagtaaacccagctattagtacttttttaggcatctcgtcttaccaatcctttcctaaattaagtggcaacttttgcatcaatgcattagcatttaaacctaaatgctgggccaacttttctttttcctcatcacctaaagcgactaatggcaaacgacatccccctactataaatccttgagcattcaaggctgccttaacaggagctggtgaaggatacataaacaaagcctgcattttcggcgttaaccagcgttgaatcgtgcccgcttcaggataatttccttcataaagatcatcaaacattcgccgcatttgtttgcaatataaatggctagctacggaaataacgccattggctcctagtaatcttgcaggtaacgcttgcgtatcttcaccactaaataccaaaaaattaggatctttatgatcaataatgtattccatttcttctaaagatgcacattgtttgattcccttaatatttttaaggcgtgataattggactaccgtttctttttccatttttacgccagttctaccgggaatgttataaatcataattggcattttagtctgagcattaacagcactaaaatgtgcaatcatgctacgctgatcaggcttattgtacggtggcactactactaaggcataatcaattcctttaatctgtgctacctcattggtgaaggcgatagtggttgcagtgtcgttactgcccgttcctgcaataaccggaacacgtccattaacaatttgaccaaaatgctggtacaagtctatcttttcatcatgagtcagagttggcgtttctccggtcgtaccaccaactacaaagccattgcaaccttggtcaattaaataattaaccagcttttctaaactggcaaaatctattttttgattctcatcaaatggcgtaacaatcgccgttaacaaatctgcatcaattaatgttgccattttattgcctcattctattaatcaaaaatcctttgattgcatcaacgccgcgctgaatgcttttctcatcaggattaagtgtagccgtatgcaattgtgaatcaggattaccaacacctagccaaaacattgttccagggaatttagccagcaaaaagccaaaatcttcacccgtcatttttggttcagtagtaataaagttaaccgtcggctggcttttcatatatgaaataaagttcttggttaattgtgggttattttctactggccaatatccaccttgattcaagtctaacttcacttctacaccaaagcttttctcaataccaagacagatttctttgagacgttgatcgattgtcaaaatcatattttgagttaagccacgaatcgtgccctcaattctagcttgaccagcaattacatttctaatcgtaccagcttcgattttacctagagtaataacaccactttgaattggatctatgcttcgtgaaataatagtttgaacctgcatgatcaaacttgctgctgcaactaccgtatcatttgcatcttgcggaaaagctgcgtgtccacttttacctagaatatcaatattgacttcagttgtaccagcaaaaagtgtacccatccgacacccaatgctaccagcaggcaaagcggggttatcatgcaagccatagaactcgtcaggtttaaattgatcatgaaaaattcttttttcataagcttgcatcccaccactttggctttcctcggctggctgaaagaaaaaaagcaaattatcttgtggctgattttcactaaaatagcttaacaaacctaatgccacggtcatatgaatatcatgtccacatgcatgcattactccctcatgttttgatgaaaatgccagtccagttttttcagtaactggtaaagcatcgatatcagcacgatatcctatcgttctgtgtggttttcttcctttaactaatactagaattgcggtaggcagtgtcgacggtatctcaacttccaaataatcttgcttaaatttttgaattacctcgattaaataatcatgtgtttctttttctgctagtgctaattcaggtatttgatgtaaatgccttctaatttgaattaactcactttcacttaaaactgacattttataactttctcagattatcttctagttccgtcttactactagttttttcatcaacttttttaataattttagcaggaacgcccgctaccatcgtatgtgctggcacatcatgagtaactactgctccggctgcaataacggctccttcacctacatgaacaccctcaatcacaacagcattagccccaatcatgacattatcatcaatttgaaccggtttagctgaagcaggctcaattacaccagccaatacgctaccagctccaatatgacaatgttgtccaacaatggcacggccaccgagaactacgcccatatcaatcatggtattagccccgatttctgctccaatattaataatggcacccatcataattactgcattattaccgattaccacttgatcacgaataatagctcctggttcaattcgagcattaacttttttgaagtccaataaaggaactgctgaatttcgtgcatcattttcaatatggtaggccgtaatttgatgattttcttttaaaaatggttcaatatctttccagtcaccaaagatcgcgccagaatgagcttcagtaaaattctcaatttcctttggaaaatcaatttgtgctaaatctcctttaataaagacttttaccggtgtcttttttggtgcattaccaatgtaatcaataatactttttgcatctaactttgccatcttttttctcttttctaatttaaatatgattgatctaaatgaaccaagtcttctaaactttcacgcttaatgactaattttgctttaccattttctgcaaataccactgctggtcgaggattacgattataatttgaagccattgaatacccatatgcacctgtatccaacatcgctaacaagtctccagctttgacttgtggcaaagcttgatcttctgctaatatatcgccactctcgcaatacttaccagcaatacgaacatgttcagtcaaaggcgcttgtggatcggtggctaaaactgtttcatacttagcctgataaagtgcagggcgaatattatctcccatcccgccatcgacagtaatataagaacgataacctggaatatccttacggctacccaccgtataaaggttgtaaccggctggaccaacaattgatcttcccggttcaatatcgatttcaggtaaaggataattcattttttcagcttcagttttgatcaccttaacaatcgtcttaacaaattcttctggtcgtaatggatgatcttcttgggtatatttaatcccaaaaccgccaccaacattaataacttgtgcaagatagccatacttttctcgccaatcttgcgctactaccattaatttttgtgctcccatttcaaagccgtttaaggcaaaaatctgtgagccaatgtgagcatgaatccccaacattttcatcctaggattagctagaacttgttttaatgccttttctgcttgacctgattcaagatcaaagccaaatttactatcaatctgacctgtttgatcatattcatgggtatgtgctgaaatccctggtgcaatacgcaacatgacactaatcgtagcatcgtacttttttaaaacttgcgccaataactgaatctcatgaaaattatcaataataattttgccaacatgattttttacagccatttccaattcagttaatgatttattattaccatgaaagctaactctctccattggaaaattggcttttattgcagtaaataactcacctgctgaaactacgtcagtgtatgctccctcttctgcaataacttgatacattgcgattgctgcgaaagctttacttgcataactaacagcataggccatgttttcttcttcaaaaactttcttaaaagcccgaatttgtcgacgaatttgatcgacatcataaactactaatggcgtaccatacttttgagctaattctactatatcaactccaccaatcgttaaatggccttgctcattaatctgatctactgcaatttgtgaattcattttgttctcctgtctttttcaggcgaaacgctaataaaaaatccattgtctgcgccaaacaaacaatggattaatttctacttaatctatggtcgatagcgctccgcgaattttgttcgcgacagtccgcagtttattcaactacgccccagctcaagcctttagcatgactcagcttcggcaacctccccttttacaattcatcttcgttttgcccaactcagaattgttacttatgtcggctgcgcctcttcgattgactgtagtttacaattttataaaaacatagtcaacaaatttattataaaaatttaattttatttgtaacaatgcggcatttagagtgataaattacagtcatcacttgcaagattaaaaaataatgttagaattcaattaaatttagtctgacttttttatttaaattaatgatttctgaaaacaaacggagttttgaaatgaaaatcgtaaagtttggtggctcttctttagctaccggtgaaagtgttgcacaagcaattcaaattattctcagcgatcctcaacgacaagtaatggttgtctctgccccaggcaaaaggaatacaacagatatcaaagttactgatctgttaatcaagtacgcagatttagccttaaagcacaagaattgtgttgaaatcgtgaataaaatttttagtcgctatcaagaaattggtcattattttggcttagctgatacggaattaagtattattaaacaaattttattagagttgcccaatcagggttatcctaacgaaaaatatcttttagctgcatttaaggcacatggtgaacggcttaatgctcgtttaattactttaattttacgccatcaaggaattaatagtcgttttcttgatccggctgaagccggtttaatcgtgactggcgagcccaatgatgccattgtcaatccagagagctacttaaatcttgaccaaattaaaattaaggctgatgaacgtatcgtatttcctggcttttttggcatgactccgtctggtaatatcgccactttttcccgtggcgggtcagacattaccggggctattctagctcgcggctttcatgctgatctctatgaaaattttacagatgtcaatgggatttttgccgctaatcctcatattattgagcatccccaatccatcaagaaaatgacttatcgcgaaatgcgagagttgtcatatgctggcttttctgtttttcacgatgaagcattgattcctgctattcaaggacagattcctatcaatgtgaaaaatactcatgatcctagcaatcctggcactatgattgtcccagaaaaggattttgtcccagataatgcaataaccggcgtaaccagccaaaaacatttttccgcattatatttgcataaatatttgctcaataaagaagctggtttcaccttacgtatattacaaattttataccaacataatattccatatgagcatatgccatctgggattgacgatattaccattatttttaacaatgattttctaaacgatcagttaattgatcaaatttgtaatgaaattcaagctacaattaatccagatcaactcgaatggattgaagattatgcaattattatggttgtcggcgaaggaatgcgacaaaaacataccatcagccgtcaaattatcgattctttaggcgatcatgatatttcaccacaaatgatcaatcagggagcttctcaaatttcaatcatgatcggtactaaaaaagaaaaggctgatgaagcagtaaaaattatttatcaaaagttttttaattagggggcattatgattaatttattcaaagttcacggttcgcaaaatcatttctttattcttgatcaaacacaattcgaacacgaattaagtgacgccgagctaaaaaattttacgcaaaagattaccaatccacaaactggactgcttcacggagcagatggcgttttagtagttaatcatcctgtgcattctaactcacttggccagatgcgtgtaatcaatgctgatggaagtgaagcatcaatgtgtggcaacggtctacgcaccgttgctcgttacctaagtgaaaaaacgggaaaagataatttcctagttgacacaatgaatgccagcttacgtgttagaagagaaaaagattttgcttctaacgtgccagcatttgcagttgagatctctcctgtacgctttaataaagaggcactcccttttgataatttaggacaagaacggattattgatgcttggttgccagaaatttatcctggattacgttttacttcaattgccgtacctaacccacatttaatttcttttgttaatcaagcagaaattaccggcccgatcttaggcattgttggtaaaaaattaaatagcaataatccctactttacagatggcgtcaatgttaatttcgcgcaaattttagataaaaataaactttttgtccgcacttacgaacggggcgttggttttaccaatgcctgtggtactggaatgtccgcgacttctcttgctcttactttaacccaccccgaaataggcaacttaaatacaccaatatcagtttataatcctggcggtatggttaaaactatcgtgcattatgaaaaaaatagttattggatcgagcttattggtaacgctacttttactcatcgaattaagctttctgaagctgacttaaggaaaggtgatttttccaatgtccagatccaaaagactgctgaacaaagtgcttatgaaaaatttattgctaatctgccaaagttcaatgacattacaactttagcgtaaaaaaatggcttgcaacacgcaagccatttttactttttaattattaatctaagtctttcaagccatgctttttcttggaaacgcgataagctactaaaccaaagaaaattggaccaaagcttgtccaaaaagcagttgcatatctatgctccaaaactggttgcaaaaccgtaaatataattccggtgcaaacaatcagctcaacaaagactactaacgcaaccgtccatttatagttagtaaacactctaaacttgcgcggataatcttttttaagaaagaatggaaatgcaccgatcaagaaaatataaggtgcagtagcggctacgttacccatatccgtcagaatttgataaaagctagtcgctgcgctaccaccgaatgagaccaccgcaattaataggcaaacgaagacagtttgagcccacatcgcattagcaggaataccgtgtttatttaatttagtcgctgccttaggccataaacgtggatcagatcccatgatgaaggatttaattggtgaataaagcaaaacaaagagagcacctgtcattcccatcaaaccagataaagcaattgctctagtaaagaatttaccaatcaataaactcgtgttaggatccaaatgaagtgcggttccaaaggctttgccaagtgtgccatatacggtatacgtaatatttccagtattggcattggctgctaaaatatctttttgataattaactgaaaagccggtcataaaaatcatcaaaacataagaaataatagtgaacaatgacccaataattaagcctttagggaaatctttttctgggtgtttcatactgtcaatcacaccaccgacggtttccatcccaccatatgcaaagactgcataaactacgaaagaaataatcgtaattggcgtttgaaaacttttattaggcgaaataataaaactttgccacccagtaatcggctgagccaattgcccatgattcataatcaagaccgttaaactagctagaataaagactgcattcattacaatcatgaaccaaccaccgattgatgacataattttaattccagttatccctctggaagacaggtacgttgatacaatcatgaataaaattgctagtacacctatcaattgagtaccatgcaagcccaaaatattccattcttgagttgtatctttgccaaaaataagggcagagattgaaatccaaagccttgaggcgcttgcaaccagccacagcacccagttagccagccatacaaaagtcccaataaaggcctatttttgtccaactgagccagctaaccatgaataaataccaccttgagcatcatgaaaagcagacccatattctgccatcattaagccagctgggaaaaagaaacagacgccagccaaaataaaccaaatgatcccagcatatgtcatttgctcataagaaacagaaacattgccaaaaccataaaccgttgtgataatcatcaacacaaggctcatagtcgtcaatgattttttagtttgtgaattttcatcatccaagataaagcctctactttctatttacactttccattttagcatcgtttatcttgaataaatttattctaattttaggctcataagaaaaaactactagttattcactagtagcccttcatttttattcattaattcttttttcaatccaattacttaattcagttacatgtaatttagtgaccgaactaaaagtcaaaacggtgacatgatcatagttgagattcaactttttctttaagcctgacatcaccttattagtttgactcttttttattttatccatcttggtacaaactaccaaaattgggatatttagatattgagcataatcatacatagcaatatcatctttggttggttcatgacgactatctactaagataattagtccctttaggttgggtctagtttctaaataatcttgaatcatttcgccaaattcttgccgcttcttctgtgaaactttggcatagccataacctggtacatcaaccaaataaaatttttcattgactttgtagaaattcaaagtttgtgtctttccaggctgtgacgaggtcctagctaagtttttacgctttaatagggtatttatcaagctggactttcccacgtttgagcggcctgctaatgcgatctcaggcaagttatctttaggatattgatcttctctaacagcactaactgcataactactgctttcaatgatcattgacacttacctgttctttattatcagtatttttgcggattacctttggcttagcgtgcttagtaattacgtccttagttacttcaacggtctcaatatcctcttcactaggagtttcatacataatatccataattgaattttcgataattgttctaagtccacgtgcacccatatttctttggattgctaagtcagcaattgccttcagagcaccatcagtaaacttcaaattaacatcatcaagtgataacaacttcttatactgcttaactaaagcattctttggttcagttagcactctgaccaaatccttactactcaatttatcaagcgtagtaataattggaattctaccaatgaattcaggaatcattccaaatttaactaagtcagctgtagtcaaatggcgtgtccaatcatctgcattaattttatctgcctcattttcagcaccaaagccaatggtctttttacctaaacgatttttaacgatttgttcaattccgtcgaatgccccaccaacaataaatagaatgttagtcgtgtccatcttaatcatttcttgttgagggtgtttacgcccaccttgaggtggaacagaggcaattgtaccttccaagatctttaataatgattgctgtacaccttcacctgaaacatcacgcgtaattgagacattctcagattttttagaaattttatcaatttcatcaatataaataatgccacgctgtgcacgttccaaatcataatcagcattttgtagtaacttaagcaaaatattttcaacgtcttcaccaacataccctgcttcagtcaaggtagttgcatcggcaattgcaaatgggacatttaaaatacgagccaaagtctgagcaagatatgtcttacctgatccagttggtccgatcattgcaatatttgatttttgtaattcagttgaagaatcaacatccatttggctaattctcttatagtgattatatacagcaactgataagacttttttagcacggtcttgaccaataacatattgatcaagttccttttttatttcaacaggcttaggtaattcacgagctgctttaagtgaatctgctcgtaattcatcgtcaataatttttttagccaagtcaacacattcattacaaatatatacaccgttaccggcaatcattttcttaacttggtcttgagttttgccacaaaaagcgcatttaatctcttcttgatctgtaaactgatttgccattatttttcctcctatatctaccaaaaatcagattatcataaattaactaatattgataaatattaagctcgaacagcaaaaaaagcggcctatagccgctctttttgagaaattagcaaatattactattacttgctttccttcttgtcatcgtcttctttgttttcaagctttgacttagcaacttgcttagcattatcagtaataagatccatagccttacgtacagtaatgtcgtggcctaacatgtcatctgataaggtgttacgtaccatcttttcatccatgttgtattctgaagcaagatccttgatttctttatcaatttcttccttagttgccttaaggtcttcagcagcaacaatagcttcaagaactaagttagttttaactctttcagctgcattcttttcaaattgtgaacgcaattgttgttcgttggtattagtcaacttgtagtaagtttgtgggtcaataccttgacgttgcatattacccaagtattggttcaattgagtatcaacatcttcttgaatcatagcatcaggaatttcatcgatagtagcgttgcttacagcaccttcaattgcagcttcttgaatagcgtcgtttgcttgttgttccttttgttccttcaagtccttcttgatcttttcctttaagtcatcaagggtgtctacagagtcatcaacgtccttagcaaattcatcgtctaacttaggaagttgctttgacttaacttcgtgaatcttagttgcaaagtgtgcttctttaccagctaaatcctttgcaccgtaatcttcagggaaagttacaactacatcaacatcatcgccggcttcatggccttcaagttgatcttcaaagccaggaataaatgcacctgaacctaattcaagtgagtagttttcagctgagccgccttcgaatggcttgtcgtcgatagtacccttgtaatcgatagtaacagtatcgcccttttcagccttacccttcttaagaacaagttctgcattttgttcacggcgcttgtcaagttcagcatcaatgtccttttggtaaacacgagtgttttgcttaggaacttcgatacccttgtagtcacctaacttaacttctggttctacagtaacagtagccttcatagtccaatccttgtccttatccattgatacaggaacaatttgtggttggccaactgctttaatacctgcttctttaacagcagcagaatatgcatttggtaatacaatatttaaggcatcttcatataatgcttcttcaccgtaatattgatcaaagatcacacgtgatacgtgaccctttctaaagccaggaacacgcaagtttttctttactcttctaaaagcttggtctaaacctaatttaatttcatcttgtgaaatatcaaaagtaagatcaccggttgtcttaccggtcttttcccatttaacagacattaattaaatacctccaatgtcaaatttgagtttgcatcttgcatactaagttatcttaccttaaaaggccgcaaaaaacaaatttaaaagaaaaaagatgcgctcctgtgaagaagtgcatctttttttaactatatcgttagaaattagtcaaggatttcagtaacctgaccggcaccaacggtacgaccaccttcacggatggtgaacttagtacccttttcgatggcagctggcttgattaacttaacagtaaattcagtgttatcaccaggcataaccatttcagtaccttctggcaattcaatttcaccagtaatatcagtggtgtggaagtagaattgtggacggtagtctgagaagaatggggtgtgacggccgccttcttccttcttcaagatataaacttgacccttgaattccttgtgggtttgaattgagcctggagcagccaatacttgaccacgaacaacttggtcacggtcaataccacgaagcaatacaccaacgttatcgccggcttcacctaagtcaagagtcttgtggaacatttccaaaccagtaacaactgacttaagaaccttgtctaccaaaccaacgatttcaacttcgtcaccgaccttaacagtaccacggtcaatacgacctgaagcaacagtaccacgaccagtgatagtaaatacgtcttcaactggcattaagaatggcttgtcagtttgacgttctggagttgggatgtattcgtcaacgatgtccatcaacttaagaatttgttcttgagcttccttgtcgccttgtaaagccttcaaagctgaaccacgaacaactggaatatcgtcaccagggtaatcgtattcagtcaacaagtcacgaacttccatttcaactaagtcgatcaattctgggtcgtcaactaaatcacacttgtttaagaaaacaacgatgtagttaacaccaacttgacgagcaagcaaaatgtgttcacgagtttgtggcataggaccatcagttgcagcaacaactaagatagcaccatccatttgtgcagcaccggtaatcatgttcttgatgtagtcggcgtggcctggagcgtccatgtgagcgtagtgacgattttcagtttcgtattctacgtgggcggtattaatagtaataccacgttccttttcttctggtgcagcatcgatttgtgagtaatcttcagccttagccaaacccttgtcagccaaaacagtagtaatagccgcagttaaagtggtcttaccgtggtcaacgtgaccgatagtaccaatgtttacgtgtggcttagttctaacgtaatgttctttttctgccattaaaatgaccctcctgtaaatttgcaagaagtccgttgagataagttaacggataattctctgttgaatattgtactactttcttcggcaaatgcctagtaaaaaagcttaagcgaaattgcctaacgaaaatatcctttgctaattatactaaatagtttgaaaatgtaaaccttttttacttattttttattgcggtaagtatttatatattttttctagtaatttttgatgactacggccatcttttctttgtaaaaatgagactaaatcactagcaaaactgtcaggctcatcaatatattggttaattttagggtaaagactgcctaataccaaattcacttctcccagcattaatggcaactgacttggactattgtgaaatttgcttccaatgctagaaataatttcacggtacttaggttctttttctagaagcagtgtattcgccggaataaagctctccatctggcctattacccaaatttcaaacttttcttcaagtcccaagcgaactaagtcttcacaaagtgacaacctaacagcaaaatctggcgttggatctaataagacgcttcgtgcaaaagctttaaaattaggcaggtttaacttatgtaaactttcataatccgactgagtaacctgttctcgttgtttaaagttttgcataatctgccgctgtttttcttcagaagctggttttaccttttctgataagtccaccccaacaagattttttagttgtagagcttcaataaaaaaattatttttagctagaatttgacagtaacttttaaatactcgctgatcagaaaaaagatcaggctcctctttaattaaagcatatgcctgatcttcttgtttattagcgcaatagagtttgcagagtttcaaaataacgtccaatgaatgctcttcacgtaatgcttcttctagattttgaatagctgcttcgagatctcccttacgctcatcttcttcagcaagtttcaataaattttgttggcttactgatgtcatttttagtctttcttattactttcttttttcttatttatttttttattttcgtctttggcatggttcttattgtcattttgtgctttttcattgcgtttctgcatagcacgatgacggttttgatttacttccatgaccacgggcaagatcactggacgacggttagttttcttgtataaaaacttctccaaatcaccgcggatatcttgcttcaattcagtccaatcaaactttttgtgttcaaaattggcctgaattgcttttttaattacatcaattgaatcactcatcaactggcgattagccttgatatagacgaaaccacgactagtgacttttggctctgcaataatctttttcttcttacggtcaattgtaacaaccgcaataaagattccgtcatctgataggacctcacgatcacgtagcacaatattaccaacatcaccaacaccagaaccgtcgatcatggtatcttcacctggtactgggtcagttaagaagaaacgcttctgcttaaagtcatattcaagacagtcaccattcttggtaatataaatatctttaggattcattccagctttaatagccaaatcacgtactacttcaagtaaacgatattcaccaattactggaattaagaattttggcttcaaggttgtaatcaaaagttgcagatcacgaccagttgcatgcccactagtatgtatatttctgcctaactggataaccgtaccgccagccttatataccaaatcactggtttcagctaccatcgtttcaaccgcatgtgacggagtagttgcaataaagaccaaatcgcccttatgaatcgtaatcatactatgacgcttcttagccattttttgtaatgagttaagtggttcacccatacgcccagtctctaatataactgtctgctcatctggcacagtcttcagatccttaactcgcatcaacaagccttcaggcacatctaaatagcctaatttcattgaagttctaacaatcttagctagatcgcggccagttaataagacgcgtttccctgttgctgctgcagcatttaaaacttcttgaacacgattcaagttagaggctttagcagctacgataattctgcctttagcatttctgaagacattagtcacaaatttaccaatatcttgttcagatgcattagggaaagatgcttctgcattagatgaatcacttaaaagcgctaaaacgcccttttgttcaatttcagctaagcgatccatatcagtccgataatttaacgcagctgttggatcaaatttaaagtcaccagtataaacaatttcacctgctggtgtatgtacatctattccaagtgaatcaggaattgagtgtgtcgtatggaagaatgaaatacttgcattcttaaaatcaatttcagtatctgcatcgattacgtggaacaaactattcttacggcgtttgttttcgcgttgtacttcaattttagcaagttcgatactcaattgtgaaccaaatactggaatatcgtatttacgcaaaatgtatggcaatgcaccaattgaatcagcatgcccatgtgttaaaaagatacctgctactcgatctccgtattgttcaaagaaatcaaggtcaggaattactacatcgataccaaataaagaactatcagggtactttaatccggcatcaagaacaaaaatttcatcattaacttgaacggcaaacatgtctttaccttgttcacgcacaccgctcaagatcataattttgatttgatcagccattatatttccttttctatctaatttttaattcttatggatctatcgatctcaacgtaaaaataatctgtttcaattttagcataaagaataaaattatgacagagacaaaaaaagccagccttttcggctagcttcattattcaatattatgtgaaaattaacgacgaagacctaacttcttgatcaattcacggtaacggttaatgtcgttgttttcaaggtaacgaagcaagttacgacggtgaccgatcttcttaagcaaaccaacgtatgagtggtggtcatgcttgtgactcttcatgtgatcagtcaagttgttgatatcagcagtcaaaagagcaacttgaacttcaacagaaccagtgtcaccttcgtgagttgcgtattccttcataatcttttctttttcagtctttgaaattgccatagttaaattcacctttcattaaataattgccgttaacaacgtttatcgtcggcgtgaacaaataaacagcgttagcggttcacaacagtcataatcatacacattattttttaaaaaagcaagcagaaattaccttgcatccgtgatatttcttaagtataatggatgaagtaaatttctaaatcattggaggtgaatttcatgccacaaatcaaatcagctatcaaacgtgttaaggctcaaaatgctactaacgaacgccgcgcttctgaattaagcaagttaagaactgctatcaagaagtttaagaacgctgttgaaagtgatagtaaggaagacgtctccaagttgcatttagaagctgaacgtgctttggataaggctgcttcaaaaggcttaatccacaagaacaaggctgctcgtgacaagagtcgtttaaacaagttagcaaacaagtaaatcttacttattactaataataaaaagaggagatctgcagtgatctcctctttttgtatactcttagacatttaagataaataatttcaaaaaattatcttctcggtaagttccatttttatatttaaattctaagtcgattgcatcccttaataaattttctagcttgtctatcttcaaccgattacgtagggctaacttaaccctatagggatgaacgcctaattcttttacaatttgtggttcgctacgacctctttgtgctaagatcttaacgaccaaaatcaattctaattgattttcaaagaccgctaataattgaattggattagtcccttcacgtaattgattatctaagcgctcaactgcttcacggtaattcttatctaaagccgactccaaaatagcgaaaatattttgtgctagggacaaatctacattttgcattactgatttttcagtaattttgttatcggtagctaccatttttagcttttgataattgcttaaaatagtgtcaattacctgatcactccgctcaattagcagctgtaaagctgactgtgtgattatatatccctcatctttgatcaaggctttagtcgttgaagcaacttcatagggcctaatttgtggctcaaccacattgaattgctttagaacagttttagtcagttttttacgcctatcaattttttcataagaagcaacaattactactacatcttctaaatcagctaagttttcaaaaatcttttgtaagtcatcaatttgtttctgtaattttttagataccttagctgttaaaaagaaaggatttttgactacaataaatttctgttcactaaataaactggattcagttaagctcgcaatcaattcatctaagccatcgctttcgcaatcgacagtcacgtgctccaaatctttaaagcgatcttccttggcatatgatctcaccaagtaatcattgagaaagtcatctgcaccccaaattaaggtatgtggattattgttatttgtatttttaaacaaagaaagtaaggtcattttttatcccgctttaaaaagtaactaaatctaggactttgcagtccgccataataccagctaatcataccacagtcttgcgttgaaacccatggtatttgctgttgagttagtgtcgttagcgtctcttgatgggggtgcccgaacctattttttcgaccagcagaaataaaaacttgcttaggatggattgcacgtaaaaagtctggattggatgatgttttactgccatgatgacccaatttaaaataatctacctgaagtttcatcctctgcataatttccttttcaccatcttgacctaaatctcctgtaaacaaccaattcttattcgctactctaaaaagcaaactcagggaatcttcattctttccttctcctgcttgatatggataaaccacattaaatgtaatctgcggttctttcacccgcattcctgcaagtaactccaataatttggtatcttttacacgaccatctaatctcttttgaaaagatggattcttaattagtccttcggccataaataatttcttaacattaacctgctctagtaatggtcctaaatcaccaacgtgatcggcatcttgatgcgaaacaaagactccatcaattgtattaattccctgacttttcaaaaatggaatagtaattcgatcaatctgaggtgtctgctttttgccactaaagtttagtttcccaccagtatcaattaaatataccttgcgaggaaatggcgtagtcactagaatactatctccttggcccacatcaatgaaggttacttgccctcgcaaaggaaaatgaatcatgctgaagaaaattacatacaagctcaacaagcccaccataattttcttactattaaagcgccagttaactttttctcttaaagaaacaattaaaataatcgttactattaatagcaacagacactgccaccaattaatttgcccaaaagttagtagtcccaacttagtagcagataattgcccaatgattttctcacctaattcaagcactttttctaataccggagcaaaatctttagtcagaccaaacgtcacaatattgaaaaaagcaattggtaaaactatccaattgaaatatggcactactaacatattaaaaattacagttaaaaaattgacctgataaaagaaaagcaatagtaatggcgttaataaaatatttaacaaaattgcttgtttaaaactgccaaacttatcagttaactgtaaacccaatgccaaaatatagctcaataaggctccagttgccagaaataaacgcggtactactaaaagatgtaaaatgcaggtcaatcccagcagatctatcgacgcaacatgatatttcttaaacttacaaattttgcctaaaaagtaggttaaactagctcttacaaagccggcttgaccattgcttagaaaaatacctagcaataaaaccaatgtacagcagacaaaagtttcttcatccgtcagtttcaagttaaaacaaaatacactaattaacaagacatagattccaacatgtaagcctgaaatgcttaacaagtgaataacacccaaatctcgataattatttagtatttcttgattttcttgagcattattttcacccaagattaattcactagcgaaaaagcctaataactgtggcatcttggcaaaatagttctgcaattcaaaacgtaattgatgcaattgatccccaaaatcagtaatcgataatagcttcatttgacaactactgtatttcaatttttggtaaatctgttttgcctgataataattctgaaaattaaactcaccaatattagttgctggctcaattgaattgcattccccattaatttctgtcactaaaatagggttcccatgcttaagcagttctttttgaacatctgttaccttgccaccaattaaaattttaccttgagcgaaattacccacacctgttaagtagtcgtctttaattcttacctgatcagggtaaattcttaattggctctgctgggttaaaacaaaattggtttttggtttacttaaaaaaatcagtaatagaaatgctccaactattagactaactatttttaaactaactcgatatttttgtactaacagtagcaaaaagtaacccagaaaaaataaagctactattttttgcaccattgttgtacaagaaaaagccaaaaaagagattgtaattagcaacaaagcggttattaagtaaaagccaacttcatttttaaacagccaattgatctttaaggctcgcaaaagttttttctcctattcctgatacctgcattaaatcttctatctttttaaaagaaccattttgttcacgataagcaataatctgttctgcctttttttgaccaattccagttaacttttgtagttccgttacattagcagtatttaagttgatcttagtgccatccccttgattacttgggctactgctactagtactcccactattttgactattatcagctgatcctgcagttgccacattttcaaccttttcacccttgtaaggaatatgaattttatcttgatccttaagcaaagtagcgcggttaatagcttttaattgtgctctagcagtagtacctccagccgcctcaattaactcctgcagacgagcaccatttttcaatgtatatactccctgatgcttcaccgcaccggaaatatcacaagttacagtcttagaaacggttgttgaactactgctagtcactgcattagtattagtggttgcacctgaactactagtgctagactgcataacttgatcctgcactgcagcagcattttcttgatgatcccctttcttcaatccataaaatccaactacaagaattattgcaccaatgagatatgcttttttctcaagcacaaattcttttactttttcaaaattcataaaaatcacctctactatttattacgcaaaaaaagcccagaattttttctagacttcaaattttttgaatttttttagtagtgtgtctttagatagtttaatgcatcatcaaaagtgctcacagggacaattttcattttggtgtgaattttctttgcggttctcttagcaaccgcataattagtttcacttttcttcacactggttgaatcagtcggcgcaaagaagacctctgcaccttctctgctagcagctaccacttttttatcaacaccaccaatgattcctacttttccggtaggtgaaatcgtacctgttcccgcaatcttatgtcccttacttaagttctgcttggtaaagacctcatagctttcaagtgtaaacatcaatccggctgaggggccaccgatttcgccagcattaatttttaacttaggcttagttttcacaactacatgctcaactaattgaatcccaattcctggcttattagtaccctttactttaacaattttgccagtaaagtgtttctcttgcttaccacgcaaaactgagattgttactcgtgcaccaatcttttgtttacgcaaataatccatcatctcttcagttgagctgaaacgatgcccgtttgcgcctaaaacggtatcaccaatttggagcttatttttaaaactagaatttttctggacttccattacataaacgcctagatattttaagctatgctggttacctgcttttttagctgcataataaattgcattctgctgacttgtttccatataccagttttgcaactcattatattgagcactagtttgacctcctagcagctccttgcttgatacacgctcatcatacggacgagtaaaactccatagatattgcaaaaccggagccggccgactagttatgctaactgtcaccaaataaaaattattcggacgtttatttgatgacttaataaactggcccacgggcattgcctcaccaggatattcaatataataatcggtcggccaaacagcaagtaccactaataaaacaagcgcaattagtgccaagagccaattacgcaagtgctttttcgattgattgtttttcttattattcatgttttagcttctctctcaatgcaatcgctgcttttttaggtaaaaacagactaacatcttcatcaaaacgagctaattccttaatcatgcttgaagctacaaaagaattttctggactcgtaaaaagcaaaactgtattcacatctggagccaattttttattaatcccagcaatctcctgttcatagcggaaatcagcactgttgcgtacaccgcgcaccataactttagcatgcaattcatgtgctaaatttacagttacttcttccggtctttctagcacttcaatattaggtatttcccttagtgcatccctgattagatcagcacgttcttcaggcgtaaacaagtatttcttagctgtattggtcatcgcaactacatatactttatcaaaaatttcagcagcctttttagcggtctccacatgcccattagtaatcggatcaaaactccctggaaataaagcgattgtcattattagtcctttcgataaatcctcacaattgtttttcctaaatggtgttctttgatcaatgaaaaaccagtaatttcacccagttctgtatgatcatcagtttctgctaccacaattgcatgatcattaagtaggttcgactttaccatctgcaacatgtccttagcgattttttctttggcatagggcggatcaagaaaaactagatcaaacttttcatcattctcagaaaataattttaatgctgcagagctgcgcatattataaacattaaaacgctgctcttccttagttaaagcaacatttttcttaataattgtacaagcagcatgattaatatcaaccagactcgcatggtcacagccccttgaaacagcttcaattcctaaggcaccactaccagcatataagtctaaaacattaccaccctgaaaaaattgtcccaatgaattaaaaagggattctttcaccttatcactggttggtcttgtccgattacttttcaaagtaaataaatttcttttagcatatttccctgaaataattctcattttagttgattctcacttttttcttgttcaagttgcaatttcttttctgctttttgggccatctcagctaattgattttcaatatgttggctatccaaatttacttcttcttcagctgaaatttcgacatgattaacaaaatccaaatgagcaatttgtcctttgatttcattgcattcgttgcgattaacataaagaacacaatatttcatttttttagaaaaataaacaatgtcaccaaaatggcgcaacttatattgatcactaactgattttaaataaataatcaatgctacccttttaattaagtgggtactttcaatttctttattgatactcatgcaactgtttcatccttttcctgtaacattttttcatttgctgaaacgttcagtactaaaccaatcgcagcagtcaagacaatcattgatgaaccaccatatgaaataaatggcagcgtaacccccgtaatcggcaacaatcctagtactgcaccgatattaaagaatgcttctgtaaaaataatagtcgtcacgccaaagcaaattaatgcgtcgaattgagaaaccgcgtgaaccccaacttccataatctgccacatcaaataaaagagtaatccaaccaataaaattgtcagaatcacacctacttcttctgctgtaatggataaaataaagtcggtatacggctctggtaagtaacctcgcttttgcatactattacctagtcctacgccaaataatcccccattgtggattgcataataggagttaactagctgggccccacctttttgctctaattcaaagggatgcaagaacgacattagtcgttggaattgataacttctttgtaaaaatccaggattccaggcaactacaataaaaaatacagctgtcactaagatcacaatcccagctaaccaagttaaagctaatttagttggaacccctgatactgaaaacattactaaagtgatcataaataaaattgctgtcccaccaaaatcaggttcaacaataaccaaacacattaaaaaagccgccaaaattgctgggtgtgacaaattatgtttgatcttacccttgactaattttccatctcttctgtctagtacatatgacaaataaatgaccagagccaatttagtaacttctagtggctgcaaattgataaagcccaagttaatccaacctacagcaccattaactgccgcactactgccatgagcaaaacgtagaaatactagccatcctaacataagtatacaaattaataaaaatccccctacaaactttggatttttaaatactttgattcttaatgcaaaaaacggaatcccaaacaaaaagaaagctactatagcatagattgcttgccgtatcccatagacatttggcttaaatccattaactaataaaatatctgaactagctgaatataccaaaattatcccaaccactactaaaataagatagggaataaaaatctggtaattaagataacgtaattttcgacgcacaagcgttgcccctttatctaaataatacttttttcattataaaacaaaaagatcatcacttctatcaagtgacgaccttttaaaatttattaaactatcttagttagcacggttacgcttcttatcagacttttgacgttctgaagtgttcaaaatcttcttacgtaaacgaatagattcgggagttacttcacaatattcatcatcatttaagaattcgatagcttcttcaagagtcaacgttctaggagtcttaatagcagcagcgtggtccttaccggcagcacgagtgttagttaagttcttacccttagttacgttaacagcaatatcacgttcacgtgatgattgtccaacaatcataccttcgtaaacttcaacaccagcaccgatgaataactcaccacgttgttctactgattgaagtgagtaagtagttgattgaccttggttaatggataccaatgcaccattacgacgacctgggttccagttctttactactggcttatatgcttcaaaggtgtggttcatgataccatatccaccagtttgtgacatgaattcattattgtaaccaatcaaaccacgtgatggaactaaaaattcaagacgagtttgaccattaccagttgattccatattcttcatctcaccttttctttgtgaaagtgagtcaataacagaaccaacatattcatctggagtatcgatttgtactgattcaaatggttcgcacatagtaccatcaatttcacggtaaataaccttaggacgtgaaagttgtaattcgaagccttcacgacgaagttcttcaaccaaaattgaaaggtgaagttcaccacgacctgaaacagtccaagcgttcaattgatcagttggttcaaccttcaaagaaacatcggtacgagtttgacgaatcaaacgatcttcaagcttcttaggagttacttgatcaccttcacgacctgcaaatggtgaatcgttggcaacaaagtccatttgaagagttggtggatcaatcttaagaagtggcaatgcttctggatgttcagctgatgcaatagtttcacccacgtagatatcattaataccactaatggcaataatatctccagccttagcttccttaatttcgttacgtttcaagccaaagtaaccaaataacttagtaacacggaagttttgagttgaaccatcacgcttcataacagtgatgttgtcactaactttaaccttaccacggtaaattctaccaacaccgatacgaccaacatagtcatcccaatcaagcatggtgatttggaattgtaatggctcatcagagttgtctactggagcaggaatattcttaataatggtatcaaagattggatccatagtttccttttgagtacttggatctggatcatatgatgaagtaccattcaaagctgatgcataaacaactgggaagtcaagctgttcatcgttggcacctaattcgatgaaaagttcaagtacatcatccaaaaccttcttaggacgagcgcctggacggtcaatcttgtttaaaacaacgataggttttacgccagcttccaaagctttctttaaaacgaaacgagtctgtggcattggaccttcataggcatcaaccaaaagcaatgcaccgtcaaccatgtgcataacacgttctacttccccaccaaagtcagcgtgacctggtgtatccaagatgttgatagtagtatccttatacttaacagcagtgttcttagacaaaatagtaataccgcgttcacgttcaatggcatttgagtccatagcacgatcttccagattcatgtgttctggcaaagtatcagattgcttcaataattggttaaccaaggtagtcttaccgtggtcaacgtgggcaatgatcgcaatgtttcttagatcgtctcttcttttttctgacaaaagtattcctccccactcttcaataaaaaaactgtgactctgtcacagtttcggtaacgcattagcgccttatcgaagtgcttttcttaaatctgtatagttacgttagtgaattttaccacctaactgcatacgggtcaacgcttaacaatcaagttaaccctggatttttttatgcaaaaacaagcaaaaactattaaactatggtaaaaatataatgtagataataatttttaaaaaggagtaattattttgatcttaatgaaagatatcgtacgtgacggtgatcccgtcttacgtcaagttgccaagcctttaacatttccatttagtgatcactataaaaaattagctgatgatatgatgcaatacttaattgattcacaagatcctaagattgctgaaaagcaccaattaagagcaggcgttggcctagccgcacctcaagtaggtgaaggtgtacaaatggctgcacttttagttcctgatgatcaaggcaaaattatctttaaagaagtttatgttaacccagagattgtctctgaatctgttcgtcaagcttgtcttagcgaaggtgaaggttgccttagtgttgatgaagttattaatggttacgttccccgccctgataaattaaccattcattactacaccgttgacggtgaagaaaaaaccattcgcttaaaggattacccagcaattgtttcttctcatgaaattgatcacttaaatggtcacttgttctatgaccgcattaataagcaggatccattcgcacttaaagaagatacagtcgtaatttcttaattgttatttaaccaaaacaaaagcctgcagatgcaggcttttttgtataaaaaaagtcactggttaactaggccagtgactcatacattgggaattaagaagattgaagagacttcttataacgagcaaatgaatttattaatcatttactacatgattatcgtacaactgatgttattttacgtcaataacattgaccaaatttgaaactgtcaaatcttttgtgtaaatagatctttctcgtaaattgattttttaattatttatttaatcaaagtaggattctaaggtgtcctgaacctgaccaaagcctttatgaattcgattgaaataacggtcattgtagctcattgcctgaatgccaataaaagcatcaagcgactgttcagttggaaactctgccttaggcttagctttgcgcttgatcacattgttaaatgattcaatcatgttagtcgaataaattgaagctctgatctgcttgggatagttataaaagaccagcagatctggttctatgtctttcaagcttctgataacatggctgtaaaccttgccccatttggtatagaagtcatgcaggacagctgtggcttcttctttgtttgtctgttgatgcacctgtttgaattcgttcatgatcttttcacgatcgtcgacgcgtactttagcgcagatattgcgcatgacatgaaccaaacagcgttgaaaatgagctttaggataagtcctggccaaggctgttttcatgccaacaacaccatcagaaagaaaaagctcaacttgctttaagcctcgggatttcatgttttgaagcatatctgtccagacttcaatgttctcgctaggtgcaatgcagtagtcaatgacctccttgtgcccattaggcttgatgccaatggcaatatagactgcttcacgctcaaatgtttctcggcgcaaaggaaggtatgtcgcatccaaatagacgcagaaaaacttgtcgcttagcttgcgtttgtggtaagcctcaacctttggaatcatctgcttggaaatatttgatacctgagctggactgtaatggctgccatacatcttttcaattagatcggctatttccctggtggtcacgcccttggagtaaagcttgataatcatgctttccaagatatccgagtgctgcttgtagccaggcagcgtgtgctgatgaaattgaccgttgcgatcccgaggcacttgcacttcaattgggccaaattgcgtatcaactttgcggaaataagcaccatttctagagttgccagtattccagccatttctggcatagggatcatagcccagaaaggcagtcaattcagcttctaacaagttattaacagcctgttgtagctctttgcgcaataaatcatttattttgtctggattgaatagagcttgagcaaaatctttggtaaaatcattcatgaaggagttcttctttctgtatgtgtttttttgttcaaaccaatcatacgagaaaggaactcctttttctaatgtttaaagaaataaatttaaggaatcattcatccttacacaaaatattttacagtctcccaaatttaatcggtaaaaatcaaaagaaacataattatatacttaactttataattatgataaaattttcatagctattgagtaatttttactctacattgaacgtttatacattaataaggagaatcatttatgatttacaaagttttgtatcaaaaagacaagattgtcaatcctcgtagagaaactacacaaactctttatatggaagcagacaacatggtcgaagcaagaagtatggttgaggacagtaccccctataacattgaactcatccaagaattaactggtaattcgttaacttacgaaaaagaacatgctgactttaagttaacaacgttcgacaagaagtaataaagagtgcgaattaaaaataatgaagtagccgtttatgcaatcgggggtttgcatgaaatcggcaaaaatatgtattgtgttcagtatcaggatgaaattatcatcatggactgtggtattaaattccccgaagataacctattaggtattaattacgttatttcagactattcttacctaatcaagaatcgtaagaaaatcaaagctcttgtggttagtcacggacatgaagaccatatcggtggtattccatttttgttagaaaaaattcctgaaattcctgtctatgcgacaccatttgccctttcattaattagaggcaaattggaagaacacggaattttaaagacaactgaactacacgaagagcatgaggatactgttttgaagtttaagaaactttccgtttctttctttagaactactcactctattcctgatactttaggtattgccgttcatacaccactcggtgccgttgtctttactggtgactttaagtttgacttaacaccagtaatggatcaacctgcaccagattttcaaaagatggctcaattaggcaatgaaggtgtacttgctcttctctcagattcaactaatgctgaagtaacacaatttactaagtctgaacgatttgtagctaagtcactacataatatcatcactggaatccacggtagaattatttttgccacttttgcatctaatctttatcgtgtatcaactgctattcaagctgcaattgataccggtagaaaggttgcaatttttggacgtagtatggaaaatggcgttgataatggggtcgacttgggctacttaaatttgcctaaggatctaattgttgacgcagatgagatcaacaaactaccacctgaaaaagtaatgattttatgtactggttctcaaggtgaaccattagccgctttatcgcgaattgctaatggtactcaccgtcaaatcagcttacaacctggtgatacagtcatcttctcctctaacccaattccaggtaacacattaagtgttaaccacttaattaataagttaatggaaggcggagccgatgttattcacggaagagtaaataacgttcatacttccggacacggcggccaagaagagttaaagatgatggttcgcttagttaagcctaagtacatgattcctgttcatggtgagtacagaatgcaggttattcacacccagcttgctcaacaagccggtgtacccgctgaaaacacttttgttttatctaatggtgaagttgtctgctttggccctgatggcgctagaatcacaggacatattcctgcaggtgacgtttacgttgatacttctggtactgcagatgttggcaacgttgttgttcatgatcgtcaaattctttctgaagaaggtttagttgttgcagttgctacagttgattataagcacaagcgagtcttagctggtcctgatattctcagtcgcggatttgtctacatgcgtgaatcaactgagttaattagtcaagcgcaaaagcatgtttatcatgtgcttagaaatgaaatggctaaatcaaatagaccaaaagcaagtgacattaaaaaggcgatcaccgaaaatctttcagacttcttgtattccaagactgaacgacggcctatgattttaccaatcattatcgaaaagaaatagtaaaaaagactccttagggagtcttttattttagaaaatgaataatatgcataaaaaaattaaagttcagttattagttaatgaggtcgctgggaatggcaatgctattaaagctgataaagaattacaagatatactaaaagaaatgaatacgcgtggtgctagttaaatcgttctagacaataagccaaattataagctaaaattgcaatttccaaccggctttgaaagcctatcagactacgtgctcgattgttctcggcattgtaataggtcagaagcgaaaagtcgctttcaattgttctgcgaatagccatcaattgatgatcattgtgctttttagctcctgtcatatttttacgatatggtgtccaaagttcgtaacccatttgttttagctgttgatgcagttctttgcctaaatagccttcgtcgccaagaagatagtaattagatggatgggtattttctatcagttcaactgtctccctggcatcatgaactgatgcctttgttacgacataatcaagaatgtaaccgtcatcgctaacaatggcatgaactttgaaaccatagaagtaaattttcttggtggccttataaccaatgttggcataaccgcgaaaaattttagcacgatagtttcgaattggttggcaaacaggtaccggaaggctgtcaatgatcaagaactgtccattcaggtcaacctttttattcatttcttgccgtatctgataaatcaattgcaatagctgacgtgaacgccgattaaaacgtgagtgtgataaacaattgaaacattcacagaatcttctttgtgattcaattcctgtcttagcttgccagataagtaaagccaaaatcagactgtccgtagttttaatttgatcaatatttcgccgatgagtaaactcagccggtgcatacaaacgataccagtgccgacaaattatcactaaatctttaaaactaacttgtaaatggtggctaaaacgcttaagcttaaggcagttcaatcagatcagactcttttctattattactatttacaagtcgagtctaacaagattggacttttttattaactaaaacgatttaactagcaccacgcgtaaatgaatattccttttaagcgacaaaaaagtcattatcctggagaattagtcgttctagcacaaaattacgctaatttacatctctcttctgaacatgttttaatcgtagttggtggagatggctcctttaatgaagttttaaatggaataaagacttctaattatcctgagacagctattacttatttgcctgcaggaacaggcaacgattttgcccgtggtgctggattaaccgcagatcccaggcaattaatcaacaatttgctccgagatcctgaaccggaacaagttgattgtggttttttcacatcaaatattaaacaaattcctaagggttactttgttaataatttcggtattggttttgatgcctttgttgttcatcagagtaatcatgagcaattaaaaaaacacctcaatcacctcaattctggaaatatgatttatggcctaaatataatcaaggcactaattaagcaggatacctttacagtgactgttaaaactaaaaacgaaactcttcgttacggagatgcatactttgtcactactactaaccatccctactttggcggtggttttgctattttgccaaaagcggacatttacagtcaccatcttgatacagtaattgttgaaaaaccgagtttacgcaagtttctctggctttttggtaagctgatcaaagatggttcacacgttaatgcaccagaatttcattatattgaagctaaagaaatcctagttcaaaccaataaaagtgaatatgctcaaattgatggtgaagatattgaaaagcagcccttcaaagtaacatttaaagttgatcattttaatttattaaaataaggaagaattccaaattcttccttttttatatcttatctaaaatatctcttttcgaattatgattttgataatattggtcctgatcaacgaaatcatgtacttgatcataaaatttcttccaataacggtatttttgatactgcttttgccactcccgtgcttcctgcaagtaattaccaagaagtccattaatctgatcgatatgtttaatcacctgattagcatgatacaattgctcttccacctgcttttgagttaacgttgactcctgatcttcaaaaaatagaacattttcttgataatttttttcttcttgcaattgtttactattgtccatttcttctttgatagctgcaatttcgtctggctgtaatccaattccagttttagctttgactaataacgactgaatatctgccaattgcacaacatctatttccattttttgataacggttcgaatcagtcaatgtgaactcatcatctgttctacttacaaatacaaccacgtttctgattaattgatctatatttggcaagcgtctcaataaattaataatcactgggttgttgcttttttctaggacatatttaatactttctttatgcttggccacttgatcggctatctgatcataatcagcctgcacattatactgtccatttttacttgttcgtgctttggtttccaagcaaaaaatcccgctagtcgtaattatcacatgatcaatttggttactccctaaactattctttttttcatagggatatggtaacagtaaattatgaattatttctttccctgtctgcacttcacgtaaacgagaattcactaattcttctgcggcagcgcctgccaagagattgctaagatggcgcaaatcacgttgagataaaatattcataggtcgcaaatgttttatttgattcaaatgtagttcagtcattcttttctgaaatgcgtttactttttgattgtaaaccttatagccagaattaattgcccgaattcgtaaaacattttgcagagccaaagctcgtttcaaatcacgtttattattcaacaaagttttttcaactatcatagcatcatgaacagtttgtgaatcagttacttttttatgtgtaatccaagctttttgataactagcatgattttctaactcattcacatactgatttaagtcattttccaaaggcaaaattttgtttctaccttctttgactattgagccataatagcgcaaattttttgtaatttcgtctaactcattgaattcatgtttgccataatggtaagttaccttagtttctccattccaactagtcttacgccaataatgaccatccgtctcaccaaattcaactaattccgccactgaacgatctaaatagtacttaatcaaataatgacaatggcctttattgtcaaaaatgcgtcgcttaatataacccggtcgcattaattcaatgatctgaaaggtcaagttcttatgattaggaaaacggtatggtaatcttttgcctgcaattttttcaattttagttatttctttcttatctgttacagataattctatttttttcattttcttcttttttcgcttttgaaaaaaataataggttaataagcctattgttagtgtaattattgtaatatccatgttaattatccatattttggaacgtatgtttagacaacaataattataccatgattttgtataatgaaaaagccccttgttttaacaattcaaggggcttttatccttataatttgatattttccattccaatcattggatcaatttcaccagaatatattttttccgaggttagaacaaaatcttctgctacttctgctttatcggtttcattctccatttcttgagctttttcgtgctgcttgctttgatcagatttatccaatgattttgtaatacccaattgctgacaaatcttcgctgctaagccagtcttacgatcatttcccggcgtcttaaaagctgccacaaatgcccgtggatcaccaactaacactaagtttttctcagctcgcgttattgcagtatacaaaaggtttcgttttagcatcacaaaattctgcatggttagattcaagatcaccaatggaaattctgaaccttgtgatttatgaatagtgattgcataagcccgggtcagatcatttaaatcttttctagaaaaggcaacttctcttccatcaaaatctgcaatcatgcattccttggcatcatcttcatcaatgctaatgatcttaccaatttgtccattataaatatctttttcaggattattttgcaattgcagaatacgatcgccaattcggaaaacttcattatgtgcttctaataccttacttttaggctgagatgggtttaaaattgcctgaataacattattaagattagttacaccaccattgccaagatacatcgcgctaagcacttgaatatcatcttttgcaaatccacgttttaaagcaagtttaacaatttgtccaactgcatcccctactaattcgggacgacagctaataaaagaataattatttgttttcttaaacaatgcttgctgatctttaccctcattaacatcatgcgccaaagtaataatcgttgaatcatcaccctgtctatgaatctgcttcaaaatagtagttggaaacgcttgcgatttaatcaggtcactgaagacattgccagctccaaccgaaggtaactgatccttatcaccaacgaaaacaatatgccgcgtatcatgaatacttgccaaaagttgtttaaaaaggaacatgtcaaccatcgacatttcatcaacaattaagatttcaccatttaactcattcaagtcctgagtgttagtatcaccaatacctaaccccaacattcggtgaattgttttagcactgattccggtaatttcacccattcttttagctgcacgtccagtcggtgctgctagtaaaaacggaggatcttcactgtaaagagcggaggaaggaatctcagccagcttgcgtaatactaataaaattccattaatgatagtagttttacctgtacctggtccacctgtcaaaatagaaatcggttggttaactgcgtttttgatggccaacttctgtgtatcgtcgtagtgaatcttaagttccttttcagcatccttgattgcttgctctacctttttatcatcatattgttctctttttttatcttcttttttttctaccaagtttttcatcaagcgagcaatatcaacttctgtttgataaatattttgtagagcagcattctcaccatcaactattactttgccagcttcttgtaaactattaatacagctagcaattgggtcgaattgattgatttgaagcaatttacttgcttctgttaataactcagctaagcctacataagtatctccctcaccatttaaagcatcgagtaatacttgataaacagcacctttaattctacgtggatcatcactagcaatatctaattggcttcccatcatatccgcggttttaaatgcaaaacccgaaatatcattaactgctgcataaggatctttctctagttttgctaatgcttcaccatgataaagctggtaaacccgtcctgcaatacgcttattaatgccgtatttagccaattttaaaattacttctgaataagaatccatcgcatttagtcctgccaaaagactatccttttgctttctagttaaagaaagcttatcaatcttagctggactttccttcaatacatctaaggcatttagccctaattcatcaataatcgtagtcgcagcctttttaccaattccagggaacttattcgaactcaaatacttagttaaagatccctcttcatgtggcaatacttgcttatagttatttgctctaaactgcaagccaaatttttcatgcattactagtttaccctcgaagcgatagctactattaatttgaatatcgccaaaattccctgtcaccttaatatcgggacgagaataatcggataaagtgccgataatttcaacgtcaagaattttatacaagtctttactattttcaaaaacaatcccgttaaccttaccggtaaattcattcataatttttcttttccttgtcatttagcatcttcataattgaagcatactgattcattgcttgttgataatacttagcatccatctgcttagcttgagcaaaatatttttgagcctggtcacgatctttttctaatgtagtgacacctagtaaaaaataaactttcgcatttttcttattatcaggaattgccaaatacatttgctgagcctgttgattctcacccaaacttaaccaaatatcgcctagcaattcctgaattcgctcatcaatttttttgatcgtcaaagcataagctaaagctttttggccttgccctaattttaagtaagttagtgccttttgataaagagttaagtcatcattaggtatctgatctaataaagccagtgctttatcaaaatcgccttgcatgtaataacacactgccagattataatttaattcttgtggctctttaaccagatgctgggcctgctccaatagcttctgtgcttgatccaagcttccttgctcaattaaatacgtcgatagctgcaaataattagcaacttgttgtggatgctgatcgatttttttgattaaaagatgaatggcttgttctactttaccttcatcataaagttgcgctattttttgatccattataacgagtccgtcttcgataatttacgtcctaaataactagtttcattccacactaccggtttaaaagtctttccgccatctagtgtttctaagacagttaaagaggtattgctaaggccgccatttttgcgaatatctttcaatggatagcctaaaagtccacccataatagctgataatgccgcaccatgactaactgctagaatcttatcatcatcgtcaggaaatctttgtgccatttcttgagcaaatgcttttccacgagcaataacatgtggataatcctcaccatgaagttcagtcggatcatatttatctggatggtgccaaaaattatccatttgtttagggaattttttctctgcatccccaaacttcattccctccatatcgcccaaattaaactctctgagtcgttcatcgatcacaacaggtaagttagcgttcattgcatcatcgatgccctgagcggtattaaaggcccgatcaagcggactggcaaaaattcctctaaatttagttccttgcaagtgatgacctaatttttttatatcttctaagctttgtggcaaaagtggtgaatctccatgtcctccttggaagcgactagctaaattccactcagttttgccatgacgaacaaaataaatttgcattgcttaaatccccctaattgtctaatcaataagaatagtttagcacaaagaaaaaggcgttcgaaaaatcgaacgctctttttgcatattttttaaactaattgtaattgcttttcttcttggtaagcagcatcaatattaccgccacctaaacattcttcacccttgtataaaacaagtgcttgacctggtgtaactgcacgagctggctcatcaaagtaaacatcagcagtattgtctgcggcatgatacttaacagtcacgccgatatcacattgacgataacggaactttgcagtacagtgcatctcaaaatcatgatctggcttaccagtaaagaatgacatatcacttgcattcaagcgactagcatatagaagtggactatcatagccctgctctacaattaattcattcttcttaagatccttgccgaccacgaaccatggatcagttgattccttagttgagcccaagcccaagccctgtctttgaccaatggtgtagtacattaaaccagcatgctcaccaactaccttaccatcaggagtgaccatcttacctgatttagctggtaagaattcacttaaaaactttctaaagtttctctcaccaataaagcagatacctgtagaatcttttttcttcgcggtagctaaaccattagccaaagcaatctctctaacttgtggcttagttaggttagctagagggaaaataaccttactaatctgctcttgactcaattggctcaaaaagtacgtctggtccttgttaccatccttaggacgcatcatatgagtaacaccattggtatccttaacagtcttagcatagtgccccattgcaatgtagtcagcatccaagtccatcgcaaactccaagaacgacttgaacttaatctgactattgcacattacatcaggattaggggttcttcccttcttgtattcatccaagaaatattcaaaaacgcggtgccaatactctttttcaaaattaattgaataatatggaataccaatcttatcggcaaccttttttacatcttcatagtcttcagtagctgtacagacgcctgaatcatcggtatcatcccaattcttcataaagacaccaacaacatcgtagccttgttgtttaagtaaaagtgctgaaacagacgagtcaacgccaccactcatacctacaactactctagtcttgctattgtcaaccattattcaatcaatcctttacttcaagcaaaatcttacgctcctcaagatcctttaaaatataatctaaaagttctacagtaggagctaattgcttatttttaaaaatattaaccttctgcaaaccgttgcgatcagtaataaccatagttaaatgcgacaagtccttattaatggtcatctttaacttagtaggcgcgttataaggtgaatcattgtaaagaggatgttcataattaaaattacccttagctgtcttcacaaagccagcatcaatcaaagcataaagcttcaactcaagattcaaagtaaacttacgtttatcaccattaatcacaactgtatttgccataattttcctcacttatttataataagatactttctttttgaaagcaactatttatttttagattgaattctttgtacaatttttactaattcttgagcgaattgctcaatttcttcatccgtattataacgcccaaatgaaattcggatcgactcatttattcttggtgaattttctccaaaacaagcaattaaaacatgtgatggctccaaagaaccagcagtacatgctgaaccgcctgacacggcaaatccattcaaatcaagatttgtttgtaaagaagtagtagatacaccattgagatgcagattaagcacatgatgtgagtaacccggaccatacccaccattaatttcataattaatttgatgatcgtctaattcctttaaaataatgtcttgataatgagcatatttcttttgcaaagcatcacgaccaatctcggatacttcacggacagcttcgccaaagccggcaattcctggtacgttctctgttccagctcgacgtttggtttcctgctcaccgcctaaaatcaaatttggaatatcgatatccgcattttcatataaaaagcctaaaaacttaggtccattaattttatgtgcagaaacagacagaaaatcaatgttcatgtccttaacatcaattttaattgtgcccattccctgaacattgtcaacatgaaaatatgcattggagtcctttaccattgccccgatttctttgagcggcataatggtaccaacttcattgttaacggccataatcgatactaaaatagtgtctggcgttaattccttttttaactgttctaaagaaatttgcccgttttcatcgacattcaaatagacaatgttgtagccctcattttccaaacgtttcattggattaagaaccgagggatgttcgatcggcgtagtaataatctttttaccaatatttttacgagcataggcagttccaagaatcgctgtattattgctttctgaaccacctgaagtaaaaataatctctccatcttgagcattaatatcttgagcaatctggtgacgagctcgatcaattacatttctggccctacgacctaattcataggtactagaggcattaccaaaatcatttttcatttcatcggtaataatatcaattaccttgggtgacattggtgtcgttgccgcattatctaaataaatttcacgcacgtttaattcatcttttctacataatcactaattaacttagctgccttagcgccgacttccttgacaaacttgtcaaaatcattgtctgcattagcatccccattatcggaaattgcacgcatagcaaccaacggagttttaaaatgacgagcaacttgtgcaaaagcggctccttccatttctactcctaaagcttctggaaagtttttcttgattaactctttttgttcttctgattgaacaaaagtatctccagtaacaacaagcccttccttaaaatctacgtcttcttcacctaaatatttcttaaatgcttccctttcaggcgaattcaacttaaaggtagcaggctctcttggaatctgaccttctacatattcaccggcactaacacagtgagcatcgtgataggcaaaatcatttactaaaatcacatctttacgatgaacatcatcttgtaatgatccagcagaaccagtcataaaaattacatcaattttttctttagttagtaaactagtcagattcatagcggcattcactttaccgataccacttaaacctaaatatacatcattgccattaacagaaaaatgttcgaattctgttgatccgaacatttcttttgtttctgcatggaaatgatcacgataaaattcagcttcttccgccattgggacgataatcgcaatcttcaatttatttcctcatttccactataaatgaaatagtgctaatagcaccaatataattaaaacaatcactatcaggatagcacgattcaatctttttttcagtcttaaagacttctcttggcgaatcgtttccttatcactcgattgattatgctgataaaattcttgtccatccccagccagagggcgtcttctaggttcttcttcagagtcatcccgcttaaagtcaggatttacatctacttcttctgaatcattatcagaaaaggaagattttagcttattaagtaggctttttttctgccttttacgataatcagagcgtttttctaccataactaatccttattatcggtctgagcattacgcaacatcatattctcccaaacagtaattgcataaattgtctttgcatcaacaatttttccttcagccaataaagtttttaattcatctaagctataccaactagaagttaaaaattcatctgcatccagtgcccgcttatcagtcaatttagttaaggtatcacaatagaaaagatacatcttttcatcacaaaaaccaggagaagaatagaattcactgaccttttcccagtaatctgtgcgatagccaccttcttcattcagctcacgcttcattgcatcaagcggacttgcatcagtggaatcaaccaaaccagctggaatttccaaagtaatctgcttaattggttcccgccattgctttactaacaacatcttttgttcatcattaattgcaataacagccgatgcaggcttatgcttaataacttctctagttgcagtttcaccattaggaagcttaattgtacgaacagccagatccaaaatacgtccttgaaaaatctgctgtgacgagatttctgtttcctttaaatccaaaatcccagctcctttttaggctaaataaacatttacacattgcagaccatttttaccttgagctaactgatatttaactctttgacctacttgcaaagttttatagccttcctctttaattgctttatagaagacaaaatatgacttatgattacgatcatcttcaataaagccatagctactgccttcatcaaattgttttacagtacctaaccgcattagttttcaaatccttcttgaacagcttctgggtaatctgcttcaacgattttagcacaacgaccacaaagcattggcaactttggatctacgccaatatcagttctaatcatccgacaacgaggacatacttcgccttcagcatgttcaactactacactagcattattcaattgctttgcattatcaggtgcttcaccatcagcaatagttaacttagatacaattagaatttgtctgaaatcagcatccaagtcttggagcattgccttagtttccttatctgggtaaatagttactgttgcttcaaacgatttaccaattaacttcttatttcttgcatcttctagagccttcaagacgtcatcacgcaacttcatgaatttaccccaattttcaagcaaatcatcatggttagcatattcttcaacttctggcatattagcaagttgaacgtaatcttcaggttctttcaagaagccccagatttcttccatagtgtgtggcaaaattggtgttaagatcttagccaatttaacagcagcgtcgtaaataacagtttgcattgagcgacgatcatggctgttttcaccatcaatgtaaagtacatccttagcaaaatcaagataaaatgcagaaagatcattagaaacaaagttgaagaccttcttgaagacagtagtaaaatcaaacttgtcgtaagcagcaagacagtctttaactaagtcatttaatttcacttccatgtattgatcaactgaacgaagatcagcataagcaacgcgattttcttttggatcaaaatcactagtgttggccaacatgtaacggaaggtatttctgatcttacggtaactttctgcagactgctgcaaaattcccattgagactgcaacatcagaagtagtatcagcttgagctacccaaagacgaataatttcagcacccatcttcttaattacatcgtttggtgaaattacattgccaagtgacttagacatcttgtgtcccttatcatcaagcacaaagccttgtgataatacttctttataaggtgccttaccagttactgcaacagacgtaatcaaactcgaattgaaccaaccacggtattggtcactaccttcaagataaagatcagctggatagtgtaaaccatcacgtttttccattacgcctgaccaagatgaaccagagtcgaaccaaacatcaagaatatctttttctttagtaaactcgccatttggtgaatgttctgaagtaaagccttctggcaacagttccttagctgtatgagtgtaccaagcatttgaaccttctttttcaaagatcttggcaatatggtcaatcgtttctggagtaacaattggggtaccgtcttctgcatagaagatcggcaatggtacaccccaagcacgctgacgagaaattacccagtcgccacgatctttaatcatgttgtaaagacgagtcttcccccatgaaggaataaagttagcttgttcaatttgatccagaatttgatctctaaacttagaaattgaagcaaaccattgagtagttgctctgaagacaacgggcttcttagtacgccaatcatgtgggtatgagtgagtaaagaagcttaacttgagcaaagcgccagcctttttaagcttatctgctaccaccttgttagcatcatcatagaacattcctacaagatctggatctggaatatctttagtaaagcgaccttgtgcgtccattggactgaagaccgggataccatacttttgaccaacacggtagtcatcttcaccaaaaccagtagcgttgtgaactaagccggtaccgtcatcatcagtaacataggtgtcattcattaccaaaccatattggcctacaccagtcttaccataaaggggatgcttataagtcatcccatcaaaatcagtaccttttaattgtttaagtactttgtagtccttccagcctaagtcttctgcaatggctggcaaacgatctgaaccaattacatacttcttaccgtcaacttctactaaggagtagtcaaatcttggattaacggtaatacccacgttacttggaatagtccaaggagtagtagtccaaattactaatgaaacatctgaatctaagatacctttaccatctttaattggaaaagcaacataaattctaggtgatttaatatcatggtattctacttcagcttcagctaaagtggattcacttgaccatgaccagtaaactggcttcaagcccttataaatataaccttttttatacatttctccaaagacgcgaatttcttgtgcttcaaagtcatgttgcaaggtaatatatggattatcccaatctgccataacgcctagacgcttaaagtcggccatttgcttttgaacttgttcttcagcatattgtcgacaaagctcgcgatacttagcacgatccattgtcttacggtcaacgccttgcttagctaattgttgttcaactggaagaccatgagtatcccaacctggtacatatggtgcataataaccgttcatattcttgtagcgaacaatgatgtctttagaaatcttgttcaacgcatgtcccatatgaatattaccattagcaaatggagggccatcatgtaaatcaaaacgaggcttaccttcgtttaactttaatctttgttcatataacttgttatcttcccattctttttgccattcagcttcacgaacaggtagattaccgcgcatcttaaatttagttttacctaaattaagggtatctttgattctcattaacaaaattcctttctaaaaaagaaagcctcatcctaaaattaggacgaggctaaccgtggtaccacctaaattgaacttattataagttccacttaactttgcgtaacgtgcaaataccgtttagattaattaggcagctgatcagctcttaggctcttatgctagtcttccaccatcactagctcgctgaattgccttcaagctttactgtcaatctaatatgcttattttttatagtcgtcaggaaaaacaattgttgggcctaaaggatctgatttcatttcaggcttaacattaattgtttcatgacttggactgtccccggtcattggtttaggtgcagcattttcttcattatctgcatcgtcagaatcatccggttgatccaactccaaatcatcagggccttgagaagagtttacgtcattttcatcatcattgtcaacatcttcatcttcaacgtcttcatcatcagcacttactggctccgaaccatcatctggataataacgctctaagttgaagtaatcatccaatgcatgttgccacttttcatcattcaaattatcgatttcagtctgtagcatttcttgaatattactacgaaattcactaacttgctcttttacacgcatataatccgtagaaatagtatcttgttgatgcttttggaagttaatattatcttccgcttgctttttggcatccgcaataatctgcttagcctctgcttctgctttctctctaatttcatcagcagtttgttgtgccgaaattaatgatttatttaaagaacgctttttttcgttatattcattaacttgatcttgataatcatctactttttcttgtaaatcagttaactttttatttaaagaaactacttcattcttcaagtcaaccacttgatcaagtgtatcaccataatcatcaacaatctgatctaagaagctatctacttcaagacgatcatatccattacgaccacgccgtttaaattccttgttgtgaatatccatcggggtcaattgtgtttctttgtctgccaaagtctgagcaccaccttatatttaccttttcttgtagtcgaaacatcctcaatcaaaatccgaccaaagtgtcttaaactcaagacatcgtcttctttaatcattatattagaatctgctatttcatgccaatttaatttaaccagctgactattaatcatcttttgaatttgaccgcggctttgtctgctaatacccgataatacagcatcaattcgcattgaggcaactattttcgttttttcaatcgaatcatcctcaggaaccaaaacttctttgaagctaatcggtctcagctttacttttgctctgccaatgcggtcaatttgctcttcaaaaaattccgtcatttcttttttagtgaaaaactgccattttccttgattatcattaataatatcgccaaaaatacttgtatcaatacccgaattcgccaaggtgcctaaaataacactatgatttattttagtaaatttttgcggatattcaatttcatacggctgaatctgataatcactcggtcgcagattaagccattcttcacttaaataaactcgctttttctctgcattaggatagccaccatactcttgaacaaatgcatcattaccaacaattgttcttaaaattgctcgttttcccggatccaaaaaatcagtcaaaattggctcatgcttaaaaatcagctgattaaaaagaccagtaaaatagtcaattactggtctttcctcttgattaaaatgtgggtaaaacttacttgcctgtctgcgttccattacaccatcatcctcaataaaatatcaaatatccatcttaaaacatagttttgaatgaaatataagataaataaagcaataattggcgagacatcaattccagttgaataagctaatctcgcaaatggaccttttcgaaacaaatttaaatatggatttacaaccttgtctaaaaagcgaccaacaacagaattacttagcattggtagccaactcataattgcatcaatcacgatcagcagactataaagccataaaatccacgtcagtgccaagtagattaaatttaatatattaaccattagcttaaattgtctttcttatccactaaatcactaattttgccatcagtaacaaactttggtggagttgctaaaaagattttatcaccaatacgttggatttcaccatttaatgcatatacagtacccgtgatgaaatcaacaatccgacgtgctgaactgtcttccattctgctaaaattaatcactactgctttattatttaataaattttgtgcaacatccttagcatcggaatatacccgtggttcatataaaacaatcttgcttttagccgaattcaagcctgatttaattgaaaccacattatcgcgattaactgagttcagaggcaagtcttcattttcatttttagtctgtgaggcatattcttcgtcattttctaattcatcatcattagaaattccgaaaaatcttcctaatttatcaaaagccatttatactacctccaaaactagttttcactacgatgtttaaaaaatggaatatcactgttatcatcactatcgtcctgagcgctagtttcaatttgagaaatactatcctggtcttcatcactaaaagtatcaaaaccctcataatctttcttaggctcagtaggttgggtatttcttctttgattgtcttcgctatcatttagtccccaaacactggttggatcaaccatcgtttgcttaggctgctcaggttcttgtttttcggcagcaggctgaactgtttgtggtcgatcaactggttgcttaggttcttcagccttaggagcttcttctttttctttaactggttgagccttaatttgttggctacgacctggtaattgcttagaagcagcttcttcagccttagaatcaattccagtagcgattacagttactaccacctcatcgcccaagttaggattaattgaagtaccgaaaataatgtttacatcgtcaccagcagccttagaaacaatctctgaagcatcttgagcctcaaataatgtaaggtcaggtccaccagtaatgttaagtaacacttgcttagcaccatcaatagaaacttctaataatggtgaagaaatcgccagcttagtagcttcaactgttctattttcaccgctagcacggccaattcccattaaagctgcaccttgattttccattacagtcttcacatcagcaaagtccaagtttacgtagtcagttgaagtaatcaaatcagaaataccttgaacaccttgcttcaagacattatcagcttccttgaaggcatccatcataggagtcttcttgtcaaccatttcaagcaaacgattgttagctataataaccaaagtatcaacatattgctttagctgagtaataccttctgcagcgtttttagagcgcttagggccttcaaaactgaatggacgtgtaactacgcctacagttaatgcgcccgtctcacgcgcaatttttgccactacaggagccgcaccagtaccggtaccgccacccataccagcagtaataaagatcatatctgcacccttaagtgcatcttcaatcgtttgttcactctcttctgcagctttttgtcctacttcaggatgtgaaccagcacccaacccacgggtcaacttaggccctagttgaatcttgttttcagctttgttgctgttcaaagcctgaacatcagtgtttgctgcaataaaagaaacaccttgtacgccatcgtcaatcattcggttaacagcattgccgccggcaccaccaacaccaattactttgatgacagcattcttattgtcgtctgaatcgaatgtaaaatccattaaattaaccacctttaatcaaagaatttcttaaagaaactcttcaagctattagttttttcttgcttagtattattttcatcgtctggcacagattctgttctggcagacattttgcttctattataagcttctttagcttcactttcactattagaagtcgtacttttagaaatcttggtactttttggctgagaaacggggtcttccacagcgggttcaccaaaaccatagattacgccattaacaagatagtcaacttcagacatcttatatgaatagtggacgataccataagcagctgtataaatcggattacgcataccaatttgatctggttcataaattcgggccttaacatttaacccattagcagtcagactatcaattccttgtaataggctactaccacctgtaatcacaataccacctggttgcttcaatgcattatgcttaactaaaccttttcctaaacgagtcaaaatttgttctaagcgtgcattaataatttcactaagatatacttcgtcaaccatttgctgactatttgcaccaacactattaatagcaaatttatcgttttttgaggcaaattgtggatccgcaaatccatagtccaacttaatttgttcagcatcctttttcgaaatacttaaaacagcagagatatcattagtaatatcgcttccgccttctaaatcgatgttggcatacttaatttggccatctttaataacagttgccgtacttacgccaccaccaagatcgataattaccgaaccaaaagttttttcactttcattcaatgctacacttgaaattgctaaaggcgttggcacaaagaaattattatgataaccggctctttcaatagccttcttgatattgtgcaaaggactagtaggtgcagttaataaaattccactaacacccaaggaacgtgcaatcatttttcttggatcatcaacttcagttttaccatcaatcaaaaagcgactcggcaaaaatgtaattgcttcacgatcatccttagctgctgaatgaatcgcagatctaatcgttctttttacatcatcattatttacttcttgcccttgttcaccaacattagcaaaaccagttgcagtttccagttgtaacatccctaccggaattcctgtaactacactataaatcttggcgtttgttttttctgctacaccttttaatgcacgactaattgcactagcagtttgatcaatatctactatttgaccgtgtcgcattcctgaatttggcgttgtaactgcaccgataaccttaccagaatctgcaacaacggcttttacacttgtggttcctatatctaaacccactaaaagatttgaattctccaaaattaagcccccattaatatttgccttgaaaaaattctaacataaataaacttgcaaaacagctacgatatgccataagctttcttttcactagaagttaatggtctactaaatgcacctatttctaaatcaataaggctatgtttaccagctttaattctaatagtatcataatattttagtttgctattcaaagtagcagtattgccaatcactacattaccgtccttcattactaaaataatttgtgaatttcgtctggtattcccacttaataattttacctgatttttaaatgaattaggtaaactgttaaataactttaaatcattttttaactcatctgatttattatagccaacaaaaataggtttatcttggttcacttttgtccaaggtagagctctcgtacctatttttccattatccaaaatctttcggtaagaataaccatcttttaagtaacccacggttttacgttcattaatttgtaaaatcaattgattaatatgacctaaatgaacttgtgcactttgaatttctggatatttttgggataatctttgactcaaatctttttgttgaaacaagtaatcaaaaactttatcgctagccttgatcttggataccttaacaatttctttagcaggtaaatgctctgcaccaattattttaacagtactgatattcgctaaaggtgaaatatagtatcctaaaccagctatcgccaaaactgaaaccgtcattatcagacctagcctacgtcgtaatgatcgtcgtctttctgcctgtaaatttgagagtgaggcagaaatcttggtctgcgattttcgactattcctttgttggttaaattcatgattcaagtacggagacaattctttccttggatcaatcttagttactggctttttggccatctgcctcacctacctcctagcgtgaaatttcttccatcaccttaatcacttgatcagatgcatcaggtacgcctaaagccttagaagctttgctcatttcagtagcatacttttcatcgagcaaaatatggtcaattgaagagacaaaattatttggatttaaatcatcttctggaataaccaatgctgcaccagctttttctaaatcaagcgcattcttcatttgatgattatgagttacattagggcttggaatcaaaataacgggtacacctaatgcagtaaattctgcaatacttgttgcaccagatcttgaaacaacacaagtcatttctggcaatagacctggcatgtttttaatgtatggcaaaactttaatattattaccaatatcaacattcttaattttttcttgtaccttatcaaaataaaaagtacctgttgcccaaataatttgatatggtttttgctttagcgtcattaatgacttaagcataattctgttaattgctaatgctccacgggatccaccaaatactaaaacagttggcatttttggatttaatccccatgttttttcaagatcaattttttcttcgtgcaagcttaaaacttgttgtgaccgtggattacctgtcttaactagtttcttcttttctgagaattcctttgcagcatcatcaaatgtataacaaattttatccacataatgacccaaaaatttattagctaatccaaccactgaattagattcatgaatcattgttggaatatgcattttagctgcttcataaaccatagcaccgctaacgtaaccacctgtacctaaaatgacatctggtttaaagtcccgtaaaatttggcgtgcgcttttagtagcttgtaaaaatagcttgatagtctcaaagttttttaacggatgtttacggttaaagccttgaatcttaattgttttaaagttaacaccggctgctggaacaatttttgattccaatcctttttgtgtacctacaaataagatttcatcgtttttactaataccgcgttctttcaaacgttcaataattgccataattgggtaaatgtgaccgcctgtaccgccacctgtaaaaataactctcattttatttagtctttaattcctcaacaaatctaacaaagtaatcgccacgttcttcaaatgttctaaattgatcccaagaagcacatgctggtgagaacaatagtacatcgcctggttcaactaattcccaagcacgaggaacggcctcttgtagtgtattaacaattacaatgtccttaattcctgcttttctagctgcgtcagctaacaaatatctagtttcaccataaagaacaattgacttaacatgttttttaaataatggtaccaaatcatcaaaagtgaagccacggtctaacccaccagcaatcaatacttccggttgcttaaatgatggaatagctacagttgctgcttcaatattagttgacttagaatcattataaaccttgcagccatcaagtgttgttacatattgcaaacgatgcttagcgccagtaaaggtgctcaatactgcggcgatatcatcattatcagcgcccataattttagaaattgcaatagcgactaaactattttgcaaattatgaatacctggtaatttaatatcagaaatcttcataatcttttcgttttgactttcaagatattcatcgccaatgaaataatcagcattatgatctgtctcagaaaaagtttgcattttagctggtgaaacttctttttccttagccaaaatatctttttgatcataattagcaataaagtaatcattactgttttgcgttctagttacattcaactttgcattgacataattttcaaaagtcttgtgataatctaagtggacgttgttgtaaatatcaacgatcgctgcaactttaggatcaatatcagttacacccaaaagctggaaactagaaatttcaactactaaaatatcatccttagttgccttaggtacaacttcagaaatcggtacgccaatattaccaactgcataagcatgatgaccagatttttgcaaatgatggtccaaaattctttgtgtcagcattaccgtagtagtttttccatttgaaccagtcacacaaacatagggagcatcactacaacttaaggcaacttctggttcagtaataatcgggatattcaactcctcagctttttgaaccatcggattttcatagggaatacctggatttttaactaaataatcaaaatgttctttttcaagcaaatcaactggatgatgaccgccaattacgcgcacgccgcgacttttcaattcttgtgccttagcatttttctccaaatcagctttatcatttaaagttaaatttgctcctaattgcaaaaggagttcgctaacagcaaaaccacttttacccaagcctagaaccaaaatgtttttattattataagttttaatatccttcattttatgattatccccaaattactaaatacaaaatactgccaattaatccaactaaccagaagacaatatctactttccattctgaccaacccaacatttcaaagtggtgatggataggtgtcatcttaaaaatacgcttacccgtagtttggaaagaaattacttgtaaaattacactagcagtttcacaaacaaaaacaatcccaactaacaataatgaccagggacggttaagcataatactgattgttgctaaaccgccacctaaagcaagtgagccagcatcacccatgaaaattttagccggcttatggttaaaaataaagaaggcaattaaaccaccaattacactcatacaaaaggccaaaacagcaaaattcttttgtttgaatgcgatataggcatatgtaccatatgctacaactgataaacctgttgctaaaccatcaagaccatcggacaagttaacagcatttgaaaaaccaaccagccaaaaaataataaatgccacaaataaaactaagctatggacaaccccagcaaaaggaatatataacccaaattgaaaatgatcacttgtagcaatcaagacaattaaaattgcaattataatctgtaatgctaatttttgccatgcacgcaagcctaaattacgtttgaagtaaagcttaataccatcatcaaggaaaccgataataccgtagcctaagagactgattaccaaaatccaaacaactttattcaagctgtgctgcatagcagctacccaaataacagaaataactgctgcaattacaaaaacggtcccacccattgtaggtgtgccagactttttttgatgccatttaggaccttcatcacgaatttcttgtccttcgtgatgtgaccgcataaatttaatcaacaatggaataaagatcactgtcaaaaccagtgaactaactagggcaatacaacttgccaacatcatattcattctgagttactcctttaacttaatgtttaattttcttccagcttttaattctgttcctttagccacgctttgactcgcaacagtgccggtaccttttatgcttaacttaatatctgtcaaactagcaaattggtgtaaatcactataagtccatcccgtcatatcaggacaaatgatttttcctgaagtattgacaaaaatcttagacccagactctaacttttcgccactcttaactccttgattgctaatccgatcaccgctaccaattttaaccaaattaagtcctaattgcttagtttgactttcagcttgtgcaacggttttagcttttaagtttggtacttttacagtagttgatacatcatcatttttagcaatcgaaatgattctctgcatcatcggtttgaaaattgaagccaaaatcttttcagctccgcctccaattaagtgtggttgcttaattgtcaaataaatacagtaacgtggtttacttgctggataaataccaacaacagagaaaatataattactatcaccctttagataacctccacctttagggttagcaatctgcgcagtccccgtcttaacagcaatatcggcgtttcccatcttataagcagaaccagttcctgattgcttattaagtacctttctcatgttagccacaattacttttctggttttagcactatatactggagtaccaacttttttaatctgatagccttgaattgtattgccatcagagtcagtaattttattaaccaactgtggctttaccatttgaccattattagccaaagaactataagcttgcatcatttgcattacattcacagtaacgccttgaccaaaagcagtaattgcttggtcaactggtgttttaaacgaaatcatccccggctgctcacctggaagactgactcccgtcttttcaccaattctgaacttcctcaagtacttcttccaagtcttagcacccatcttttgttctaacttaacaaaaccagtgttacttgaacgttcaaaagcttgagaaaatggaattgtgccccaacctgaagtcagccagtcatggatagtcgaaccagcaatattaacagaaccagaccggtaatactcattagggttgtaattgccactgttgactactgcagcgaatgacaaaatcttgaaaactgatcctggttcataagtatcttggaccaagatatcccgatacgacttagttaatcccttcatagtttgaggattaaaagtagggcgttgagaagttgccaaaattttcccagtcttcatgtcttcaactgtagcagtaattgatgttggtcggtaagttttctgtacttcacttaagcgagtctcaagcaaactctgcaactgagaatctagtgttaaatacaagttgtttccatttttagcaggcttataaacctgattactatttggaagctgatattcagatgcatctaccgaagaaatccggtaaccatctgtcccagtcaaagtcttattgaaataggcttcaattcccatagttccgactaagttttgtgcattagtctttttattccaaattggttgagccaatccaacagtatgtgatgcaaaaacaccattgggatacaatctagatggtgtttccaagaacttaattcctggtaatttcattgcttcaatctttttcttttgccgcaatgtcagtccactaccacctgtcccaaattgtacctgaaagaccttctttttgggggttaaatattggtaaattttttccgcagacaatggtaaaacctgtgccagcttttcagctgtcttggttttattcactacatactcaggtttattcttatagttgatcgaagtcttatctaaaatcgcataaaccgtatacaaatgcgaatcttccgcaattgttaatccatttcgatcatagatagtccctcgcgtggccttaattacctgattgcgcttataaagctgcttggtacgctgtgataaattttgaccattaactgtcttggatattccgatatataaaaatctagccgtaaatacaagaaaaaccaaagccacggccatttggagaaatctccccaccgtaaagcggtagccgtgggctttggatttttgtaattttaaattactgttttttttcattaacgaatcgtcctaatatttttgttaattagagttaatcctttttcacgtgcaattttatttaaacgtgaagtagaggtcaactccccaatctcttgacgtaaatcggtaatcttattctgttccttagcaactgtttgttgagttctagtcaattcatgttgagccgaagttgcagaaatactagaagaaactagaaagatcatcatgcccaacgtaatgacgcttccaataatcatcaaagctttttctatgccactataaggaactttacgcggatcaaggataattcgttgtcgtctttgcgaaccatttctactacttggttcatattcaatttttcttgctgagctatcagccataacattttcctctttataacttctctgcaacccgtagttttgcactgtgtgagcggttgttgttctctaactcagaagtagaggctacaattggtttgtgatttaccaaacgtagcgttggcttcataccgtccggtataaatggcattcctcttggcacctcaacttctgaatacttcttaaaaatccttttaacgatcttgtcttcatgagactgaaacgtaattacactgattcgaccacctggacgcaatatcttaattgcttcctctagcgaagcttgtaaaacatcaagttcgtgattaacagcgacccgcaaagcttgaaaactcttctttgccgggtgccctccagtccttcgtgcatacgcaggaatcgcatctttaatcacatcaactaattcaaaagttgttgcaattggcttttcccgtcgtctttctacgattctgtgagcaatttgacgagaaaacttttcatcgccatattgatacaaaatatctgccagttctttttgacttaaagtattaactaactgataagcatctaagtcctgactttgatccatcctcatatctaatcgcgcatcataacgatatgaaaaaccgcgatctgcttgatcaaattgaggggaagatacacctaggtcatagtaaatgccatctattccatctgagtaacccagttttaccaggtccttttccagattactaaagttgtcatgtaccaattctaaccttggctcactatccagttgtaataaattcgcaaagttcaacttcgccgattttatcgcatattcatcttggtcaaaacctacaagcgtaccggtgtcaattttgctgagcaaatatttagcatgtccaccaccgccaaaagttgcatctacataaagaccaccgttttttggtttcaaattgtcgatagtttcgtgtaagagtacactggtgtgtttgaatttcatattttttatagttcaatgtcgtccaaattttcagcaatatcatcatagtcttcgttagcttcttcttcaaaactagtccaacgttcttttgaccaaatttcaattcgatcagagacaccaatgatgacacattctttaatgagtttggcatgcattttcaacgttgttgtcagattaacgcgaccttgcttatcaaactcacattccatcgcaccagagtagaataaacgcataaatttacgtgtattcctcttagtcaacggaagttttgctaatttagcttcaatcttcgaccactcctccatcgagtagccaaaaatgcagccttccattcctcgcgtgaatatcatcttgtcgccaatctgatcgcgaagtttcgctggtataatcaggcgacccttgctatcaagattgtggtgatattcacccatgaacatggtctagcccccttccactaaataatttaccacaattccccactctctaccacattcataagaaaaaaatacagatttttaaatttcttttttattgtgatttttcaaaataaaaaaaagtcacaaaatattgaaattttgcgacttaagcatatacaagtaattttattttataacactagcatcaataaaagtccgatataccagaaaacagtacaggcagtcaaataatcccataattttctaactgtttttcctaaagaaatatttttatttctaatcgcatcgttcagcgacacaacaatcactaatacaaaatagcataaaaaaccataaggtaaaaaagaaggtttattcatatgtaaagtaattaatccacaagctgaaagaaagaaaaatggcataacatcgtaccctctaaactgtgctttagggaaaattttattgataaaaaaagcaactactaagccaataattggaattaggaaaatataaagcataagtattcctccattctttttattctaaactataattgatttgaaaaaaaccgttaataagcataaaatattgttcaaataggagggctgtttatggcacgaaaaaagaaaaagaaatcaggttttcaaaaattaactattgcaatggcttggatcatggcaattattactttagcagctgttattgctcaagctgctatctcacttcaaagtttttaaggattaaaaagacgcgaaagaaaaaatcttccgcgtcttttttaaactcgataagcgtttaaatcaattaagaatggataatcctgagctaaattgccccaaatccaatacaagagaaaaaagaagacaactgcccaacctaaactgactaaaatgctcattaataatacgtgtgctgatgcagcactaatacccaccatattaaaaatgagccaactatacgcaacaaaaactgcagttcctaataaaacgacaattaatctagcccataacatttccggtaaaaaacgagctgttttttgacagatccagcaacttgcaggtaggaaaactgtataaacaccgataatgccataaaaatagatatcagcaacaattcctgcacctaatgctaaccaaatttcattatcattagtatcatcaaacagaccaatcaacattacactgattggcaaaatgacgcttaacgctgcaaagttgtcataagtcataaactgatgtaagtaaagtgcacatacaccgtctactaccaatgcaataaataagccaattgccaaaacccattttcgaaacgtagacattaattagccacctgtctttcaattacagttacaacagatggatcactaatatcacctgctggtttaattctaatctgatcagatagaccaaatgaatcacgagttgtcgtagtaactgtaccaattaacaagccttttggtgagttaccgcccataccactagtatatactctcgtgccggccttcagtttgcgaccatcaaccacctgtgtaaaggcaagataattattggaagtaactgtaataataccatgtactgtttttccattcgcagcatccgcttgaacagagaagcgattagccgactcatcagtagtagtaagtaattcaaccttggaagaagcagcatttgcttctacaattcgaccaataacaccgccatcgcacatgacagccatattctttttaattccagctgaacttcctttattaatcactaataaatctgaccatgtatcaggcgaccgagaaataacagaggcgttgaccatggtatagccacttaacgtatcttttaatttcaatgcagacttcaattgcctattttctttttcaagagctgaattgcgagccttcgtctggcctaaattagtaacttctcgctttagatgattgttttcttcttgcgtatttaaaatatcatgaacactatttaatccgcctgacacgagccctactggtacatcaacaattctagtacctaaagcaacgacatcgttacccaagctttgaatcagtaaaggtgtattgcgcctattgcgcaagctaacactcccacccaaaacggataaaataacaactactataataaatgctgataataactttttattttgcagaaattttttcattaagaattgatcctatagaaaaaccggcaacagccggcttttttattatttgcgacttctacgcattacttcaatattcttgagtgattcaccagtaccaattgctacacaatcaagtggatcttgagcaataaacacaggaaccttagttgcttcagaaataacttctggcaaattcttcaagagtgcaccaccaccggttaaaacaataccatgatcaataacatcggcagcaatttctggtgaagtttgttccaaagtctccttaatagctacgataatgtcttgaactacatcttgaatagccttggcaacatcaactgcttcaatatcaacagattttggtaaaccagttactaaatcacgaccacgaatattcattgattcaatttctttagccttttcaactgaagctgaaccaatttgaattttaatgtcttctgcagttctttcaccgattaataagttaaagtttgagtgaacatagttaacaatcgcattattaaacttatcaccggcttgacgaattgaagttgatgaaacgattccacctaatgaaattgtagcaacatcagtagtaccaccaccgatatcaacaaccattgaaccagtagggtccataactggaagaccagcaccgattgcagctgcaaatggttcttcaattacaaatgcttcacgagcacctgcaactctagctgcatcaattacggcacgcttttcaacttcagtaacacctgaaggaacacataccattactgaaggcttggaattaccaacagtcttttccataaaatatttaagcattgctgcagtagtatcgtaatcagcgattacaccgtccttcattggacgaatagctacaatgctgcctggtgttctaccaatcatttcttttgcttctgaaccaacggcgattacttcgcctgtttgtgtattctttgctactactgaaggttctctaagaacaatgcccttaccttccatataaacaagtgtattggctgtacctaaatcgataccaatattctttgtacctaatccaaacacaaaaatctctccttaactgttgcggtctctaaatcttgactaattatagcatactataactttaaaggcgcctttcacacaaattttaaagaactttaaaacaatttttctcacgcaaacttaaatattgaccttctcccacgataaaatggtctaagaaatcaattttcatcatttttgcagcttgacgtaaactttcagttaattccaagtcacttgcagatggcgttaatttaccactaggatgattatgagcaataaaaattccagagcagccataaataactgcccaccgaaaaatttcccgcggatgagcaattgatctattcaaagtcccttgaaatagttttttctcagcaataatgtggttgctattgtcaatatacaatgcccacaattcttcctgcttgtgtcctatcagcttatcagctaaatacgtacctacttcaatgctagatgtcaaaattgtctttctcttaggtgaagcgcagcgcaaacgatctagtactgcctcagccgtaatagcaagttcatccgagcattctgaactggtaataaactttaatagatcattaaacgaatttaaccctgtgtttttcagaaaaacatttaagtcctgcaacgtatgaattcctttattttctagttgttcaaataattgtgtcaatagctctaaatctgttttgacaaagtaatgatttggttttctttttaacataaaatccccctcattacttattacgcaaaaaagagctaaatttttttcagaaattcaaaaaagttttgacaaatcatcgttgcattctgcttatctttaacagatggtgctttcaaatctggtaccatcacacattttaaccctgcattagcagctgcttgaacaccggttgatgaatcttcaaaaactaaaatattttctttaggtaaattcattttcttagctgcttctagataaatatctggtgccggcttagccttaatgtgacctctttgtacatcaagataactaagatgaaaatcaaaataatttctgattccagtcacccacatagcatgctgaactacattttcataattacttgaagcaatcgccatcttcaagccacgcttttcaaattcgtctaatgcttcttgaacaccaggttgcagctttaactttccctcatcagtccattgccacaccaagtcatcagttcgcttaataaaacgatcacggtctgcttcagttttaaaatatttatgataaaaatcctgcatctctttaactgtagcaccagttaacttgagataagcatcccgcggcgtgcccaaattctcttcttctgccgcctgaatattagcatcccaatacagcttctctgaattaactagcaaaccgtccatatcaaagataatgccttgaatatcatcatctagcccttgtacgcgcatcacgttttcctttccaatttaaaatagcactaaccaaataaaaggatccactaacaattaaaatatcattagctcccaagtgatctcgcagctgggtaaaagcagctcgataatctttttcataattatatcttttttgtacatcaattggaaaatcatcttttttagctactcgcggataagataaagttgtcagtaaaacttcatctttatcatcaaacaagctaaacacctgctcaagatccttatctttcatcatagtcactaaagcataaagcttgccatgcttttgctgggtcatacgatgaacgactgccagcaaattactcattgcctgaatattatgtgctccatctaaaatgattagcggattttctcgtaaaatttgatagcgccctggaataatcgtttgattaatcgctgtttcaacttcttcatttgataaaggcagtttcaacaaaaagaacgcctggcaggcaacggcaatatcataggcttcaacttgtggtcgtaaagcaaaaactagctttcttttgtgatcttgataaacaatttgattatcaagcaaaacactaaagtctcgtcctaattgataaactatcgcatgttcttcttcggctttacttttcaaaattggccaaacaacttctggcacgttacctaaaactactggtctttttgccttaataatgccgcttttctcacgtgcaatatcctgaattgtaggtccaataattttttcatgatcgagaccaattgtagtaataacacttacttctggcataattacattagtcttgtcatgttctccaccaattcctacctcgataacagcataatcacactttttttgagcaaaatagacgaaagccagtgcgacttcatattcaaaggttactaacgaaaaagttgagtcctgctgctgcaatttctcataagtaccctgcacaatattagctgttttaactaaatcctgatcactaatattttgattatttaactgtattctctcattaaattcatagacatacggtgagacaaaaaggccagtcttttgaccagccttttttagtaggtttgataaatagtatgaagttgaacctttaccattagtgcccgtaatgtgaatcgttttaactagatcttgaggattgcctaattccaacaataaccgcttaataaaagacaaattatttttaggatgtaaatgaggcaaagcatataagtaatcgattacttcttgagctttagtaaatttcaattatttactctctttcaaatcttgaattctttcacgaacaccggctaattgactttcgtagtcagccttcttttccttttccttgttgacaacagcttctggagcgtgaccaacaaagcctttgttagccagcttcttttcacaacgagcaacttcgtcttcaagacgcttttcttctttttccatcttttctagctcatcgtcaacattaacaagttcagttaatggaacaaaaatttgtgcgcctggaattacagcagtcttagctaattttggtgcttcaacttcactagctacagtcaattcctttggatgtaagaagttttcaacgtaatcagcattttcgtccaaaacgcgcttgttagcttcatcgtctaattgaatcatgatgtcgatttgacttgacattggtgcattaacttccatgcggatgttacgtactgctttaatagtttcaattaagaaggccatgtcttgatctgcttgcttgttttcaaattccttgtgagtagttggatattcagcaaccataactgacttaccttcatgtggcattgaaagccataatttttcagttacaaatggcataattgggtgaagcaaacgcaagatttggtcaagaatccaaattaagttttcttgctttcttgcctttaattcttcatcgtcaccattcaaagcaaccttagaaatttcaatataccagtcacagaagtcattccaaataaagttgtaagcttcacgaccagcttcaccgaattgatattcatcaaacaagcgagttacttcactaacagtatgattcaagcgatcgaaaatccaacgatctgataaatcaaatttagaagcatctggcatatgagctggtttagcatctgctggcaagttcatgattacaaaacgacttgcattccaaatcttgttaatgaagttccaagcagcagataatttcttaggatcataacgagtatcttgaccaggagcagtaccattaagcaagaaccaacgaagggcgtcggcaccgtatttatcaactacatccattgggtcaacaccgttaccaagtgatttactcatcttgcgaccttgttcatcacgcattaaaccgtgtaaaacaacatcattaaatggacgcttgccagtaaagtgcaaactttggaacatcattcttgatacccagaagaagataatatcgtaaccagttaccaaggcattagttgggaagtagcgcttaaagtcttccgcattagtatcaggccaacctaaagttgaaaatggccataatgcacttgagaaccaagtgtcaagtacgtctggatcttgttcccagttttcaatgtccttaggtgtttcttcacctacataagtttcaccagttttcttattgtaccaagctggaattcggtgcccccaccacaattgacgtgaaatacaccagtcgtgaacatcttccatccagtgatcaagagtttgttcaaatcgttctggaacaaagtttactttgccatcagtcttttgattttccaaaactttgtcagcaagtggcttcatcttaacaaaccattgcttagaaagacgtggttcaacttgaacgccagaacgttctgagtgacctactgagtgaacaattggttctatcttaatcaagtaaccttcttctttaagatccttaactaaggcttcacggcattcaaaacgatccataccagcatacttgccagcttcttcgttcatcgtaccatcatcgttcataacattgattctttcaagattatgacggttaccgacttggaagtcgttagggtcgtgagctggagtaatcttaactaaaccagttccgaattctggatcaacgtgttggtcttcgataattggaatgtgacgaccaacaagtggcaagatcaattctttgccaacaatatccttgtagcgcttatcaccaggtgctaccgcaacggcagtatcaccaaacatcgtttcaggacgagtagtagcaatttctacataacctgaaccatctgcaaatggatacttaatatggtaaaaggcacccttatcatctttgtgaataacttcgatatcacttaaagcggtttgaagtgctggatcccagttgatgatgtattcaccacgataaattaagccttcattgtaaagctgaacaaaaacctttttaacagctttagaaagacccttgtctaaagtaaatctctctcttgaataatcaagtgaaagacccatcttagcccattgacctttgatgattgatgcgtattcatctttccaatcccaaacctgtttaacaaaagcttcacgtcccatttggtgacggtctttgccttgtttacgcaattttgcttcgaccttagcttgggtagcaataccagcatggtccataccaggaaggtaaagagtatcatagccttgcatccgcttaaaacgaattaaagtatcttgaattgcagtatcccaagcgtgacccaagtgcaacttaccagttacatttggtggtggaataacaattgaatatgggtgagcttttttgttacctgatggcttaaataaatcttcatcaagccaggtttgatatctacctttttcaacctcgtttgggttgtatttaggtgctaaatctgtcataaaattcctccaataaaaaagtcctagacatattgtctaggacgatcagttaaaccgcggtaccacctacgttaagcatgtatcaaacatgcttctcttgaagacgataacggcgtataccggattaacctactttttattttcaattaatcagctaatcaagctactagtcaaccttcggcctctcagctgtctggcttttctctgttaataaagtcgacccctcttgattcttgctttggttatgattatagcatgaacttcactcagaaaaaagggttaggaattagtcgtaattaagttagccatatgtctttattcttttaataaatcagcaatacatttttccgatgaatgatattgcttatattgttttaacacgttgattaaatcatcatagtgactattccaaaaataataattttcatcataagatttcacactcttaagatcgttataatactgcttaacaaaatcactaggcttcactttacttttatagttatttgtatatcgctgatagtcttgatgataaagaatgtctagaatttcaatctcaggtctagtacgaagttctactacttcggatactttctttttatacacttctggaagattaaacttttcggttttggaatcaagtatcctataaattttaacctttctacttctaaaccctttattcaaaaattctttagcaaactttttagcatttcgtgctctaattacttcaccttcaagaagatcatcctcgttgaattttagtgcatcgtgttccaatagaacttccataattgctcgttcagtatgaccttctacaataatagcgattagatctgtagagttactcatccattttaaccgccttttctgtagccttctttaaagccatgtaggcatcataatctggagctgtcccacctaaataatctgattcaaaaacatcggctttatttagatcgcttcttacatcagcagttgaatatctttgaagctgaatcttgccttctctcttagtaatatattcttcatcagttctttcaattttatccaaaatttcagtatagtgcgtactaaataccaaagtagctctatttatgttgattttaggattagtaaaatactcaataaaagaatctacaatagcgtgattaaagtgattctccaactcatcaataaagatgatgccaccaacggaaagtgcattaattacctcgccataaagagttatccctttagctgtaccagaagacaagtattttgcaatcgttgtaaaatcattttctgcaatctctgtatctttccctttaaacttcagcttaaacaattgtttagtagcaccagagccctcaggcttgttttcaattttaagatattcaattgttggatctaaaaagtttaaaatttctccaggcacattgccagaaccatacatcaatgcattaaagtcagtaaagaacaaagtatcaaatggtatttgaggataatacttatttttcgaaataatcgctctaaaaatcgaatcatcagacgacaaaattgaagaagctaggtcgcctaattcttttctgtctaattctggttttatatttttgaaatcaaataattttttctttgaaagattaacagttaccttttttcgatataccgtttcagactcaatatgccagcttttacttaaagttttctttaacttgaaaactaaactatccttataaactacatgatcagttccataaaaataagttgtaacactaataggctcatttcctattagcacatccgttagcttagtttgatcaattgacttttccatcacaactgtttgaagaattcctatcaagagtttcatgatcgtagtctttccagtagcattagtccctactagagtgattaaattattcacccataaactgccgagcaaatgagttaatcgatcagaggtattagaagtaacccttgcatcactgaccagtgaaaattcaagatcatcctcaaatagcggatgattttgaatttctaattttaaaaagtataatttatttttattcataattattcacctaaaattgttttattcaggctaaattttatcatatttttgcattttatacataaaatctgtttaaaatataaataatcctcatcaagtagttactacttcatgaggattatctaaaatattctactttctaatcatcttaactgcttgaatcaaaatcgttggaatcagagccaagccagcaagccacattacttcttgcccagttaacggagtaactgcaaacaagctatgtaacgccggtacaaacaaaatcaaggctaacaaaattgttccgacagcaaatgctgctaaactgtaccagttatttttgaaaccgatcttgaagatactgtgttgtgaacgacaattgaagccatgtaaaagccgagcaaatgtcaatgttgagaacgccatcgtcgttgcaactgcaggactatcttttagtccgatcaaaaaggcagcaattacactaatcgaaatcaacaaaccttgaatagtaatttgactcacaaaggctttgtccaaaataccagccttaggatcacgtggcttacgtttcaaaatatctggatcacctggctccattccaattgctaaagctggaagcgaatcagttaccaagttaataaagagcaattgaaccgctacaaatggtactggtaagccagcgagtgaagcaaataaaacagtgataattgctgaaaggttacctgataacaagtagccaatagcgtttttaatattttcataaactgttctaccgttagcaacagctttgataattgtggcaaaattatcatcggccaaaatcatgctggcagcatctttagatacttcagtaccagtaatccccatcgcgacaccaacatcggccttcttcaaggctggtgcatcgttaacaccgtcaccggtcattgatacgatacgatcttttctctgccatgcattaacaattctgatcttgttttcaggcgatacacgagcataaaccgaaatcttctcaatgttttgatcaagttcttcatcgctcaaagcatctaattcaaggccagttaaagccatgtcaccttcattgaaaataccaattttcttagcaattgcaacggcagtcaccttatggtcaccagtaatcatcacagtcctaatcccggcttccttagcacgagcaactgcagctacactttcttcacgtggtggatccatttctgaaacaaggccaataaaagttaagccatcttctgcttcagtagaaagctcttcatcactttctttataagcaaaagccaaaacacgcaaaccattttctgaaaagtaattgttttgtgccaaaatttctttacgatcttcttcagtcattggacgaatttcatcgccgaaacgaatattgacacagcgtttcaagagcacatcaattgcacctttaacaaaaatagttggtacagtatgaatcaaatgcttagtactcatcagcttacgatctgagtcaaatggtacttcttccagacgcttagaatgttcgcgtaattcttgttctgataagcctaaaacaccattacctaagtcaattccgggcacttgacgatacatttccagcaaggctgactcagtcggatcaccaattgccttatcttcggccaaacttgcatcgttgttaagcactacatcataaagcaagtagcggtgaagttgattactcaaatccagctcatttggctttaaaactttaccaccaatatagatgtcctcaacagtcatcttattttgagttaacgtaccagtcttatctgaacaaattactgatacagaccctaaagattctacggctgccaagtttttaataatagcattttctttagccattttttgcgtacccattgcttgcacaatagttacgatagaactcaaagcttcaggaattgcagcaacagctaaagctactgcaaatagcagtgaatcaagcagcggttgaccacgccacatttgaataccaaagatcacagcacacaagattaaaatagcagtagccaatcgtgatgaaaactggtcaagtgatacttgcagcggagtgcgacgttccttagtttcattcatcaaggaagcaatcttaccaatttcagtctgcatccccgttgccgttaccacaaccgtagcacgcccataagttactaaggaactggagtaaaccatgttaacccgatcagctagcggcacttctttttcaaaatcagtgtccaacttgtcaacattagtcgattcaccagttaatgaactttcgttgacttgcagagaataattttctaaaattcgaccatctgcagtaactaagtcacctgcttctaacaaaagaatgtcgccaggtaccaagtccttggcctcaatctccattttttggccattacgcaaaactttagccgttggcgcagataatgactttagcgattctagcgacttttccgccttaacatgttgtaccgtacccaaaatcgcattcagaatcaatacaacaataattaccaacgtactttccagactgcccgtaaaagcagaaattattgccgcgataattaggatgatcaccattaagtctttaaattgttctaaaaagacctgaaaagtaattttcttctttccttcaactaaagcatttggaccaacttgagctaatttctcttgagcctctttagcgctcagcccctgctttaaatcggtatttaactctttagctatctcgtcttttttctgacgatagtattccatgtaaagccctccctaaacataagagtaatttaagcaaaaaaatagagactactggctaaaacactgtttagtcaatagtctcatcatttaaacttacagcggaaaataaatttcgttctgacgccgtaaatacaatttatgccgattactccctatttacttgtacataattaaaccatatcaagtaggtagttggcaagctattttaactttcttttaggaagttttctaattgttcatcggtaaaatcagaaccgtaattttgttcaaggagatgcatgatctcttgcttggtattaccagttcttttaagtgaagaaactaaaattttgacgcctcgtttaagtccctcttctttaccttcctcacgtgcgtcttgttctcgctccagtattttctcttcgtagtccatgatataatcactccattccgagcaataagataatcatttgtacttcttatctttcaataatccgttagcaatatcagccgaactaactggtacaccgactaaacgctcattttgccacaaatcaaaaaaatcagctggcatcatttgatcaaattcatcatctgaattcattaaatccttataaacacgtgacttctcaaataaatttagagcctgcttaggataaatgtttaatctcttagcaattaagtcgctaattgcttcagctagttgctgatgaaattgcttttcactaatttcgggaatcatctaaccaactccttatctatgaacgttaaagctttgagagctctttctgtcttgaaacaatactgctccgaataaacactcggttttaattttagcagagcctcatctaaatctagattaccatgtttccagcaattaacaacagaaaaaagtttaccatctgctgttgggccaatgacgatatcagaattatcttttatattattcattctattttgaatgacaaacttaatccaatcaatatctgcttggtaaactaatattttcaagtcgggttgatcagcatcgaatacatatctatttaatgtcggttgacctgaatatctagccttacgctttgcccatttttctgcttgtctacgattagcagtcacataaaagccattaccaaaatcagttgtaaaaacatttttatttatacgaggctgataaacagcctgattgcttccatgatacaaaatgactttggtattgcttttcatgaatcgtgatgtatgcgtatttttcatcgcgcacctctttcataaatagtaggacaaaattatcctccactatttattacgcaaaaaagcacgatttttttgtgagaaattaaaataaaaaaagaaaatgcctgagaattatatcccagacattcaccaatttacggctctttctcatttctcttccttcacaatataaattggtcgttctttaacttgtaaatagattttaccaatataacggccaataattccgatacacaaaagctgcaaaccgccaatcaataaaataattgaaattgtgctggcccagcccaaaatacttgaaccaggaactattagtttacgaacaattacaaaaataagaccaataattgacaaaatgaatgaagttgtcccaatccaaacagctaagttaagcggtgcttgagaaaaatcagcaatcccgcccaacgcatatttgaataatttgtgagtcgtccaatcagtttcaccagctacgcgctcgacattgtggtactcaagatacttagtcttaaaaccaacccaagcaaaaatacctttagaaaagcggctgtattctttcattgataaaactgcgttaaccatctgcctggtcatcatgcgatagtcgcgtacgcctgaaacaatttccactttagaaatgcgattaatcaccttataaaattgattgctcaagaaagacttaaacttaccttcccctttacgatctactcgtctgcagccaactgcatcatagtcaccagtctgcaaaattttatacatttttggtaaaagtgaaggcggatcttgcaaatctacatccattaagacaatataatctcccgttgcagctgataggcccgcatagatagcggattccttaccaaagttacgagaaaaagaaatatagtgaacatgtttgtcctgctcatgcaattttttcaattcggtcagtgtgttatcattggagccatcatctacaaaccaatattcgggcgtcactttgggcattttagctaatactttttgcactgctggataaaaaagtggaattgtttcttgttcattaaaacaaggaaccacaattgataatttttccattagatttcttctttcttagcttttctaaaagtaactactttattaattacaaattgaattaaagttgctacaaaagttgctactattttaacgattaagtgcggataacccaatttagtaacgaaaataaatagggaaaccgtagtaaataccgtggtaatctgaccaacgataaaataagaaataaatcttaatatcatgcgatcatgaactttaaagttagtataagaattccataaaaagttattgatgatcccgcaggtagacgaaataatgttagctatttcaacattcatcttgaaatgcgtcaaaattgtataaattccaaaatcaacgactagccctaatacgccaattagaacatactttactaattgaacaaaatcttctgaatagattgctgttttgattttttccataattattcctaataaaaaatccagacaagaggtcctggatttcaacatatttaactaatatggtcttaattatatcattgtttttaagctctacgttttcattattaaagttaaaactttaataggaacaccttttgcattaattataatttttgtcattcaatctatctgtcttgttagtatcctcatacaaatgataggaactcttaatcttatgcctgccttgtggatcaaacatgcagagaaagataacatagcaacactttaaatttcgatatgtgctgcatttcaaaatcatacagatttccatcaacatcctcaaccaaaatatcgagaataacagctttttgcttagggtgtttgggatcagcgacctttctctgcttctgcagataatgaatatctctaatctcaatctccggcaccagtccctgtaggacatgcttgcaaaaattcttgttagacataatctcaccaaagattacatcctctgtgaagccaaaccagggcttctttttcttgtgcgtattttccattgcgcacctctttcataaatagtaggacagaattatcttccactatttattacgcaaaaaagtgcaatttttttgtgagaaattgaagttttttaaagttttacccaactatatcttccaacttcaattccagatattctccccgctttaagttagcaggcaagcttaactttcccatcgaaattcgctctagctcaacgactttcatccctaccgcaccaaacatacgcttgatctggtgatatttaccttcacaaattttaatttcagttgtagacctatcgtgctcttcatcctgggataatatcttcaattctgctggctgcagtttggtcccatcgcctagtgtcattcctgaagcaaaagttttaacagttgcatcattagctacaccagcaatttcagcacgataaactttatcaacatgcttaccaggtgcaagcaattcatgattcaactgaccatcattcgtcaaaaggagcaagccagtagtatccttgtccaaacggccaactggcacgattccttgataacggtcctgcggtgcaagcaaggaaatcaccgttggctgattgcgatcttccgtcgctgacaaaacacctttaggtttattcaataagaaataatgatatttttgataagcaacagcatctccgttaacggtaacctgatcgctttctttaacttgctgctttggcgttttaacaatcacatcattaaccgcaacaattccttttttaattaattggtgtacttcttttcgtgagccaacattcatattggccaaatatttatctatgcgcattatgtctttctttcgttcttatgtgttgattaatattaattatataagaaagttaacccaatttcgaattgcgacactaatcaaaaacggtcgattttgttttcgaccgtttttacgcgcgttttgcgcgcgattatttgcttaaaatatattttgtagctctgccttcacccattcttctaatataaccttgtttttctagttgccgcaaaatcttcaaaactttcgtcctaccaaacttactcatttggctaatttgcttcgtagtatccgcaccttcatgaattatttgatatactttcttttcatcattagacagatcgtccgtaataaattttaaaactggcaatattatctttatcgaattatcaaaaatttcaaactgcggttgaaccaaactacttctataagaatcatttattcttcttacacctgtaccaaattgctcaattaatcctaacctaaagaaaacattagcaataattggattacgcaaaatggaaatctgacctgaaagatattcttctttgctaagtccttgtggcaatccacctggagatactacttcaattctgtcatcatacatagaaattttaatttgcgaattaatgttccaaactcgatgaactaaggcattggctattgcctcacgaaaagcttcttctggaatctgacttacaatatttcgcgttgctccctgtatttcttcatgttgataatattgacgatatttttgaattgcttgcttatactctttaagaatagattcatgctcataacttgctcgatcaagcataatattaatgctttcatcaaaccgaacaatatcaattccacgataattatttttgtctgccaaaagctcaccggcattagtgtaactagtatccttacgctctaaattaagcgtaatcaatatatcagatgttaaacttttaattcctatcttttcttttaatgcttcttctaaaatgttaaatgacaaattttggttcatcgcggttaaactatcataggttctattttcaccaattaagattaactgtgataattcagatcggtccacttcgatcgaagcactgtcattactcttataggcctttgatttgtataaatatggaggattaactccttgctttactgttaaagtaaccacattagttttaggatcaatttctaaattataatctggatttggtttgatcgaatcgttgattttattttcaacatttaaacaaaattcaactggatttttcacaccaacgattgatccatcatcctttattccaaatttaattttgccactgccataatttgcaaatgcactaaccgtttttagaaaagtattcgtcaatttctctttaaattctaaatttttggtttctctcatttaggtcaccgtttctaaactatttagttataattatactctttcacgcgcaaaaaaacggtcgaaaacgaaatcgaccgtttttacgcgcgttttgcgcgtgcctattatattaactttaaatcaatacataatactactagaagtttccatattaacaccatatctttctaaataattaaactgtatcatattaaatttcaaaaacaccagtgaaattaatcctctataacaagtcagcgtcttcttgagctttatcatccaagaatttttcatttggataaattggcgtaatctcaataccagccattgccctttcaatcaggccttcaacgtcaagacgagcttcatattcacgcgctttttccaactttggcttagtcttaggacgcggtggagcaaaaattgtacaacaatcttcaaaaggttgaattgataaatcaaaggtaccaatctcttcagctttggcaataatctccgttttatccattgttgcaactgggcgaataaccggagtagtagttacatcattgatagccaccattgattgcaaagtttgagaagcaacttgaccaactgactcaccattaaagatagccaagccgccacgttgtgcacgaatgcggtcagcaagctgcaacataaaacgacgttgcacagtcatcaaatagccttctggcagtttttccttgatcgtttcttgaatttcagcaaacggtacggcaataaaattaatcttaccagcgtagtttgccaaaataccagtcaattccttagccttagccaatgccttttcagtagtgtaaggtggactaaagaagtgaaccatttcaatatctactccgcgcttcaatgccagccatgaagcaactggggaatcaatcccaccactaagcatcatcacagccttaccagcagtaccaacgggcatcccgccaacaccatggagcaactgattagaaatataaacggcatcttgacgaacttcgattctcaagaccaaatcaggatgcttcatttcagccttcaagccatccatatgatcaaacaagtagtcaccaactagattattcaattgattagtgtcgtattcaaacttgtggtcactacgcttggtattaaccttaaaagtcattcctggcttaaaagtctcttgcatcaattccaaagaagtcttttcaatatcttcaagagtcttaggaatcttaattgctggtgagtaagtttgaattccaaataccttcttcagacgttggtcaacatccttgaatgatgcgccattcaggacaatgtgcatccgatcatgacgaggatgaaattcaatttgtgggaaatccttaagaactttttcaacgttacttgctaagcgattgatgaagtcctttctgttcttccccttagttgaaagctcgccatagcgaaccataacttctgtgtattccattaattttctcccaaatgattaattttagcaaaatgattatagatcttgtcaaagaccttaataaattcatccgcttcttgaagcgtattcgtctcatcaaaacttaaacgaattgcactagtagcaatcttatcatcaattcgcatagaaaccaaggtgctagcctcatctgccgtctttgatgcacaagcagaagtagttgaagtataaatatcttgatcttctagcgtatgaaccaaagtttcgccccgaattccctctaaagcaaagcaaagaatatgtggtgcaaagccatcgcttactggtgaaaaaatattaatccctggtttatcttttagataatcaacaattttagccttaatttctgcttcacgcttggccttttctggttcatcttctaaaagcaaacgaattgccttagccattcccgcaattgcaggcaagttctcagtacctgaacgcaagcccttttcttgaccaccaccatcgtgtaatggggtcagcatcttgccttcttttttatataaaatacctataccacgtggtgcatggaacttatgcgcagataagctcgagaggtctactcttggtgtaaaaaccttatcccaaatatttttgccaagtgcctgaacgttatcaacatggaactgaatcgttggataattttcaagcaaatcgctaatctcatcaattggttgaatggtgccaatttcgttattaacgcccatgattgaaaccaaagttgtatcagaatcaatcgcgtttcttaagtcattaacgataactcggccttccttatcaactggcaatctggtaacgcgccaacccaaattctctaacgcgttaaaactattggctacagatgcatgttccacgctagaagtgataatatgcttaccaaattcacgcttttgaattgcagtccccttaattgcggcattatttgattctgttccaccagaagtgaagaaaatttcatgctgcttagtccccagcaaatcagcaatttgtttacgtgacgcctcaagcaattggtgtgcacgatcacccatcttatgcaaactcgaaggattgccccaaatattagtcgctactttattgtaagtatccaatacttgtggatctatcttcgttgttgcactattatcaaaataaatcactatcattaccccttcatttaaaaaacggtcaatcgcttgaccgtttcaagacttttcaattttagcttaaataatgaatcgcttcaattaattactcttctcttctgaataatatgcattttcaagtcgttgataactacctggctctaccttttcaattgctgtagcaattgtatcaagggcttccttatagttatattcattatatagctgcattgctgtcttttgtgcttgcgcaattgaatccttatctgcatatttatttgaatactgcatcgtcaattcaactaggttagcggaattaatgatgtcatctgcttcacgtttaagccgctccacatcatcagaaatttgaattaattcagctgagatcttttccatattaatccggacctgacttaattcgttgctgacatgaccaatctcgttgactaccaaagtgtacatttggacaaagctatcaggattgccaggcaaatttcgtctttcaagtcgacgataaactaatgaaacttcttgcttaaagcgcttgattgaatcattagctacattttcagaatcataaagtccatcaacgtcagttgacatcttagcctgctctgcatcaatttcacgcaggcgatctagcatctggagccatgaatcttgaatagcagagtaaacacccttaccatctgcgatattctgtgtatcaatagtgtactgatggtacatttcattgacttctttttctaagtctttactcttttccaattcgccatgagtcaattcatagctctcatcaatatgccgcaacttttctaccagtttctttgacgcggtttgctgatgtgagatcaaagtcagcattttactttgatttttttcaacaaatggtcttgccttgtattccttagctaaaacatcatacaggtcgtcaatttcgccagagatctttttattttccttggctaattcatccaccttagtctcagctagcaatttgcgcgcaccatcaatttcatcatgaatttccttgattctgcccaaaacatctacgctagtaaggtaatatttttctgaaatcatttttttataagcatcagacaattccttaagctgatcttggaacactacttcaagctgatgataaccctcttttagcggttttaagcgtttttgtaagttacccaaagacatccgaatcttggacaaaactcgcttagcttcaacatgatcaccttgtgaagaaagattttttgcttcttcaaagtcactctccattgatgctagttgatcttcaacctgatcaatcgcagcaccatattcaaaggaattggctaagatatcttttcttaattcacgataaactttaatcaaagcatcatattgaatttgattttccttatttgattcaagtagttccgtgaaaactgccttggtgttacgagcatcttcgagcgttggcttgataatctcctgtgcttgtttaatattctttcttgctttaaacaagcgataagttgcattttcattagcagcttcttcaactagcttatgcactcgcggtaattttttcttagctgcttcagtgtagctcttgcgccaagtatttaatgtagttaaactttcgccggccaaatccattttatccagtcgcgtaatatcatcttctagatgcatcttctcaatttcagtcactgctgcatcaatcgcttcaatttcttttagttgtttacgattgatcattagcattgctgcaactacgacaatgattaggatcaccacggcaataattataatagcttgaattgatgacatagtttatcctccaaaactatcataattataacaaaacctgaccctaataggtgcaaaaagctgttctattttcttgatttattattctgaactctatataatactattcgtgtaaaatatttgcagcaataagtgacaagaacgtcaacatcttgaaacgctttagtgaacgagtaacccgcgctgcattgggcgaaaatgtaaatccaagatgcacgaatgttgaacttatgcttaatattttactccaaaaattattgtttaaattttatggaggattttttatgtcaagatatacaggtccaagttggaaacgttcaagaagattgggtatttccctttcaggtactggtaaggaaatttctcgtcgtaactacgctccaggtcaacacggtcctaacaaccgcggtcgtttgtcagaatacggtcaacaattgcacgaaaagcaaaagttacgttggatgtacggcttaaacgaacgtcaatttagaactttgttcacccgcgctggtaagattcgtgaaggtcaacacggtgttaacttcatgattttacttgaacgtcgtttggacagtcttgtttaccgtcttggtttagctactactagagaacaagctagacaattggtaaaccacggtcacattactgttgatggcaagcgtgttgacattccttcatacgaagtcaaggttggtcaaactattggcttgaaggaaaagtcaaagaacttacaacaagttaaggatgccttagaagcagttactgctcgtccatcatttgtttcatttgatgaaaacaaaatggaaggtactcttgtacgtttaccagaacgtgacgaaatggaaccagaaattgatgaagccttagttgttgaatggtacaacaagttactttaatttttacattttattttgtcgaaagtctttctcaatcgagaaaggcttttttctttgctacaataagtacataaaaagaaaggatgattagatgactgaagatttaaataaacgtgttgaacaagcagctcaaggtattactccacaaactaagcctgatgaacgccgcagatttttaggttcattacgtgagcgctgcttaatccgtatggacaatactgaagttaaaaatcctgaattaactgccctatttcttaaacatatcactgactttaagggctatactattttgatcaatggcaatatcactgatgatggcttcttgggagacattgaagccagttgcagcaaatatgatattcccttcactttagttaacaatgaaaccgcaaaaacaggaccacatgatacggcagtactagttgtagcgaaaaacgctatcaatcgaccacgaattgagctaaagcaagtttatccacctgagtttcctaaagaagaattagccgcacctaaaacaaaagaaagtttttggcataaactttttcacggagataagtaaatgaaaccattagcatatcgtatgcgaccaactaatttagacgaagttgttggtcaaaggcatctgattggtccaggcaaaattattcgccgaatggtggaagctagacttctgtcttcaatgatcctttacggccctcctggcatcggtaagacaagtattgctagtgctattgcaggctcaactaaatatgcctttagaaagctcaatgcagctactgacggcaaaaagcaattgcaacaagtagccgaagaaggcaaaatgagtgggacagttgtcttattgctggacgaaattcatcgtttggacaaaactaagcaggacttcttactgcctttgctagaatcgggacaaatcattttaattggggcaactactgagaacccttatatttcgatctcccctgctattcgttcacgttgccaaatttttgaattaaagcctctttctacagatgatgcttctcatgcaatcgatcgcgcattgaacgataaagaaaaaggtctaggcaaatataatgttgaattaacagatgatgcgcgtgctcttttgattgaaaaaggcaacggtgatttgcggtctactttgaatagtttagaattagctgttctttcaactaagcaagaattgcaagataaacaccaagatgatcaaaaaattatcatcactcaaaaagaaatggctgattcaattcaaatgaaggtgcaaaactttgatgcttctggtgatggacattacgatctagtctcagcatttcaaaaatcaattcgtggctctgatacagatgcagcgctgcactatcttgcccgattaattgaatctggtgacttagtctctatctgtcgaagactagcagtaattgcctacgaagatattggactagccgatccagacgcagctgaacacgctatagtagccatccaagctgcacaaatggttggcttgcctgaagcacgaattccactggctaatgcggttattgagttagctctttctgccaaaagcaatagtgccatttcagcaattgatgctgcactagctgatattcgaaccaaaaaagttgactcaattcccgccaacctaaaagatgctcattactctggtgccaaaaagcttggacatggcgtgaactacctttatcctcatgattatcaaaatgattgggtagcacaacaatacttgcctaataacctgcttcatgccagctactttgcacctaaaggcaattctaaaatcgaagctagatataaggcaacctatcaaaaattaaaacaaatgcagtctgataacttgcgcaataatcactaatctcgcgcattcaatatggttgacaagcacctgtaatatgcgtattataataagtgatctgagttgatcgacaagcttaaatgtataaagttgaccgatcaaactataagacgtgggagttggcaaataactaccgaatcggaatactgccttgttgcaggatccatattcgctgcgatgccagctaaaattttgaacattgcgggttcaacaagcgtcattatgctatgtttagtcaactcggatttctttagaatattaaaaaaggcggtctcaattgaccgtctttttctatagtggagactgttaaatggcaataaagattgtaatgattatttttatccttctcctactgttaacctcgtggtacatgtggcacagaaggaacggacattttttaatttatgacattggtggcgatccacgcttgagcaatattcttaagtggacttcagtcgcccttttagctgaaagtattttagggattattttgctattcatgggtaataaatatttaaatctaatcaccttattcttagcttcattaactattttggcttttggtttatcaattactcaaaataaagaataataattcactaatgacaagcaaaattttggtaaaatagaatatagaaagaggtgcttatatatgctttcacaatacaagaatattcaagttgcagttgatggttcaaaagaagctgacttggccttcagcaaggctgtagccatcgccaagcgtaaccatgcaacactagaaatcttacacgtaattgatactcgttctttccaaaatgtttcaagttttgattcagcaatggtagaacaagtttctaaagatgctgaaaagagaatgaaggattaccaagctcgtgccactaaggctggcgctgaagatgttcactactctattgaatttggttcacctaagacaatcattggacatgacttccctaagaagcacaatattgatttaatcgttgtgggtgctactggtttgaacgctgttgaacgtctgctcatcggtagtgttaccgaatacgtaaccagaacttctaaatgtgacatcttggtatgtcgtactgaagaagttaaggatgctttgcaaggctaattatttagctttaataaccgataaaaaaatacctccaaaattcagatttgaatttttggaggatttttttaatgttatttctaaaaatcgccagccgtactgaacatgtaatcacgattatggaacttcatcgacaagattaatccaatcccaatcatgtttcccatcagagctgaaccaccctgagaaacaaatggcaatggaatacctgtcaatggcaataaatcaatattcatcccaatattttcaaatacgtggaacaagatcatcatgataacaccagttgcaatgtatgaataaaagacatttctggtatcgaacgagatttttaccatttgaataatcaggtataaataaatcaaaatcaatgctacacagccgacaaaaccaaagttttcaccaattaccgagaaaaccatgtctgatccacgaactggaacataaacgctagctttgccaaaaccattaccaaatagttgaccagaaccaatggctttcatactttgccataactgataagctcctgatgaagtatcaccagatggatcgagccaagacttaattcgttcaaattgatatgcttgaaagaaatgactcaacaatgattgcccagccgacgtagttactaatacaataaccccaatagctgctaaaatcaaaataccatataacggtacaataattttccaagaaatccctgatactaaaaccacgccaccaacgatggcaataaatactaacatagtaccaaagtcattctgtaactttagtaaaattgctaccggtgccagccaagcaataattttgcctaataacaaccaatcggtcttaatcgtgtgaccatatttatcattatgctctttgaccactcgagccaacatcaagataaaagctggcttcataatttctgaaggctgaaaagtaatcggccctagtttgaaccaacttttcgcacctgtatctgcagctacgcttctgttatataagaatagcaccgcaatcagcaaaaatattccgattccaaagaaaattggcgcaatcttagacaactgttctgcatcaaactgcatcacaaccataataattgcaattgaaatcaagtaccataatgcctgcataactactgccctaacaggtgaaccaatatgactaggatcacctaatgcagcaacatagatacaatacaagctaattaaagccaagagtagcactggtataataatattccaggctaatcgatcgaatagacttgtttcattttcaacttttgccattaaataatcactacttatattttatttttcatgtaaggtaaagtatgaaagtaagtcattaatgctgctttcaagactgttagcaaacaaaatattgcttgtcttagaagtagtagcacgataacgcccctctaccttttcaattaaaccaatggactttctattaggaataacaacttcccacgttggcaaattctttcccttaagttcattaacttcaatatcaatattctctaattttttagacataaatcctcctacttgctatccggatgaaattttgaagcaataattggatcttcatatctctccggatgtggatttcgaaaaatagtaaaattatcaggaactggatccactccacccttgataaatgggttacaccttagtatacgacaaattcccataatcagccccaaaataggaccatgttttttcaatgcatcaatcatgtaattggagcatgttggataataccgacaacttggtggtagtaaaggtgaaatcactgtctgataaatacgtacaataaaaatcaaaatcttacgcaagtaatctcctcacttagtgtcgttgatgcttttcaatatttttaagcaaagtacctgttcctaaagcaactgcttctaatggatgatcagcaattaaaactggaacttgcaaataataagaaatcaacttatcaatattctttaatagggctccaccacctgttagcatgattccgcgatcaataatatctgctgaaagctctggtggagttgtttccaatacttctttagctgctgcaatgattgacatcaagcctggttctaaagccttttgaatctctggtgcagtaactgtagtctgcttaggcaaaccatcaactacgtcacgaccacgaacagtaatttgttcatcttggtctggttcaaaggcgctaccaatttcaatcttaatttgttcagcagttctagaaccgattaacaaattatgcttactcttaatgtaactgatgacagcctggttcatccgatcgccagcataacgtaatgattgagaagttacaatttcacccattgataaaactgcaacgtcagtggtacccccaccgatatcaatcaccatattaccttgcggtttaaaaatatccaagcctgcaccaacagccgcaactttaggttcaaagtctaaataaaccttgccgccaccagacttttcagctgcctgaataattgctttttgttcaattgaagtaactccagtaggagcacaaatcaaaatatttggcttggacataaagccttttacatttaatttttcaataaagtaagacagcattgcttcggtaatgtcaaaatcagcaattaccccattcttcaaggggcgaattactcgaatattacctggagttcttcctaccatctcatatgcctctgaaccaactgcaactaccttgtttgtatcggtatttacagctacaacagaaggttcatttaatacgatacctttaccagagacattgatcagtacgtttgctgtccccaaatcaattcctatatctcgtgccacgataaccctccataattattcaccgtccattttaccataaataatcatgactttcctttactgtccttgttttaacacaatctttaaaacaaattactcaattgcattgaagtatcgataaaagtaatgacaaaattgccaactaaaaagcctaagccaattgcaataaataaatataataattgcgtttcaaaaacatggcctttacgaataattttatctagttgaattgctttaactgcttgaaaagataagccaatcgcaatcaaatatataatgatactaataatgacatgaacgcctaattgaaacatatattttcctcaattttgacaaaaaaagacggatgcagcattttgtgcattcgtctcttccttcttctagtgacctttagtgttgtacacgctaattctgttcattgctcgtcttaaagcaacttcagcacgtgccatagtttgttcgtcatgtttttcccgtgcttccttcaaacgttgctcagcgcgttgcttcgctgcctcagcacgagaaacatcaatgtttcttgcgcgttcagcactatctgcaataatcgtagcaacattattcgaaaactcaatatagccacccgaaatcgcaatatgatcaactactgaatccatttcacggcttcgcttaatcttaacctcactaataactagtggagttaaaagtggtacgtggttatacatgattgaacgttcaccatcaacggcacgtacatcaacgatacttccacgatgtgaataaatcattccattaggagttacaacatctactttaaaaagcttctctggatctgccatttgacatcaccctacttttctagtaaagctttagcttctggatcacttggagttacacccatttcttgtgcttttttcaaaacatcttcaattgggccgacaccacgaaaggcatcttctggtaagtcatcaagatgaccatccaaaataagcttaaagcccttaatgctttccttaattggaacatatgaacctggtacaccagtaaattgttctgcaacaaagaagttttgtgacaagaagaattggaccttacgtgcacgtgcaacgatcaatttttcttcatcagacaattcatccatacctaaaacagaaataatatcctgtaattcatggtaacgttgtaaaacatgttgtactcgagtagctacttcatagtgttcttcaccaacaacttcagggtcaagggcacttgatgaagattcaagtgggtcaacagctggataaataccttgttctactaagctacgttccaagttagtagtagcatccaagtgtgcgaatgtggttgatggagctgggtcagtatagtcatcggcaggaacataaacggcttgaattgaagtaattgaacccttcttagtagaagtaattctttcctgcaattgtcccatttctgttgctaaagttggctgataaccaacggcacttggcatacgaccaagcaaagctgaaacttctgaaccagcctgagtaaaccggaagatattgtcgataaagagcaacacgtcttgaccctcaacatctctaaagtattcagcaagtgtcaaaccagttaacgcaacacgcattctggcaccaggcggctcgttcatctgaccaaataccatggccgttttacttaaaacgcctgaagctttcatttcgaagtaaaggtcgttaccttcacgagttctttcaccaacaccagtaaatacggaaataccaccatgttcttgagcaatgttgtgaattaattcctgaatgatagtagtcttaccaacaccggcaccaccgaacaaaccaactttaccaccacgtacatatggctcaagcaagtcgataaccttgataccagtttcaagaatttcacgactagtagtcaagtctgcgtacttaggtgcttccttgtggataccttcacgagggtgatcttttgaaaattctggaccaccgtcaattggttgacccaaaacgttaaacacgcgtcctaaagtatcttcaccaactggaacggaaattggaccgccagtatcttcgactttcataccacgacgaagaccatcggtagattccatggcgatcgttcttaagacaccatcaccaagctcaagtgtaacttcaaggacaatgctttcatcctctgacttaattacacgcaaggcattgttaatatcaggtaaattcttatcaattgggaatttaacatcgacaactgggccgattacttgaacgatttcaccttcactcaaaacatctacctccttttctttattactctaaggcatttgcaccactgataatttcagtaatttcagtagtaatttgtgcctgtctagcacgatttaattttgtagttaagtttgataccagatcattagcattatcagtcgcactctgcatggctgtcattgaactagcatgttcggcagtcttagcatccaaaatagcaccgtaaatagtagaacgtgcatattgtggtaacaacttcattaacacttgatttggatctggttcaatatcgtattctaattctttatgtgcttcagcttctttgacaccaatatctaaatcgacgattggtaacattttttcaacacgaaaagcagatgataatgagttaacgtggtgagtataacatacgtaaagctggtcatagacaccattcaaaaacatcttaattgcggttgaaacaattggtaaggcttcatcaaaagttggtacatccgaaacaccattcttttcataaacaacgttaatattgttctttttaaagaattgtgccgcaaccgaacctacagcaagaactttgatatcgtgtccttgagcacgttcgtcctcaaagatactcatcatattcttaatgacattgctgttataagaacctacaagaccacggtcacctgaaattaccaagaaacctgttgtcttgatattcttacgtggctgaatcatatctgccgtaatccccaaaccaaagacatcagtataatcaatttgagcaacattgttcttatcaattgagacgtctttttcacgtatattatcaactacttctgagctaattaaacgagaaatagttctacgaatatggtcgttataaacggtataacctttatcacgattttcagtttggttcaactttgaagcagagaccattctcatagcttctgtaatcttaccagtttgttttactgaagcaatttttttctttaactcaagtaaagatgcaggcatattctacctcctatttctcacttggtgtaaagctctcactgaattcttcaattgctgctgacaatttcttatcatctggcaattgactagtttcacgaattgtcttgagcaaatcagcatgactgctgtcaaagttatcaaataattcgttttggaaacgagcaatatcttcaactggaacagcgtcaagatatccgtgagtcaaagcataaagaatcacaacttgcttttcaacaggaattggatcatgaagtggttgtttcaatacttcaacggttctttgacctctattcaacttagcttgagtagcttgatcaagatcactaccaaattgagcgaaactttcaagttcacggtaagctgcaaggtcagtacgcaaagtaccagcaaccttcttcattgccttgatctgggcgttaccaccaacacgagaaactgagttaccagcatcgatggctggacgagtaccagcaaagaacaaatcgctttgcaagaaaatctgtccatcagtaattgaaattacgttggttggaatatatgcagaaatatccccagcttcagtttgaataattggcaaagctgttaatgaaccgccgccaagtttgtcattcaacttagcactacgttcaagcaaacgtgagtgtaagtagaaaacatcacctggataagcttcacgaccaggcggacgacggagaagcaaggaaagttcacggtaagcgacggcttgtttggataggtcgtcaaatacgattaatacatccctgccattgtacataaattcctcacccatagcagtaccagcatatggtgcaatataaagcattggtgctggctcacttgggcccgcttcaacaacaatggtataatccattgcgccaaaacgctttaaagtttctacttgagttctaacggttgattccttttgaccaacagcaacgtaaatacaaattacgtcttgccccttttggttaaggatagtgtcgatggccaaactagttttaccagtcttacggtcaccgataatcaattcacgctgaccacgaccgattggaactaaggcatcgatagccttaataccagtttgaagtggttgatcaactgattgtcgatccataacccccggagccttggcttcaattggacgactcttgtcagtcttaatttcacccaaaccgtccactggttgacccaatgggttaactactctaccgattaaggcgtcaccaacaggaacttccatgattcgtccagttctttgaacacggtcaccttcacgaatattgtcaaattgacccaaaataatgatacctacatcatttgattcaaggttttgtgcaataccgtatgagccgttatcaaacttcaataactcaccggacaaaacatcgttaagtccgtgagcacgggcgataccatcaccaacataagttacaacaccaacttcgctgatgtcgagcttatcgtcgtaatgttcaagttgttgcttgatcaaggaactaatttcttccgctttaatgctcaatggtttcacctcttttaatttttatcaattatctgcgcacggatcttcttcagtttattcttaactgatccatcaatcacgcgatcttctacttgaagaaccacgccgcctaaaatacttggatcaactttattctctagacgcaccacgtttaggttatatttcttagcaaaactttcacctaaacgcttgagttgatcatcatctagcttaacagccgtagttgcaacgccagatgcgaccttcttttcattatcataaagtaagacaaagcgatcaataatatcgatcaaatcagcaaaacgatcatatttaaataacaaattcaaaaagttttgaacctcatctgaaaaatctttttcaattgcagtcaaaagatcctttttatctttactacttaaaataggatcgctcaagacactaatgatttgtggattggcttcagcagccttttttaattccaccatttcattataaacagtgtctaatgcatcattgtcttgcgcataaccaaatagtgcggcaccgtagcgtgctgcaatttcttctctacttaaagccattaatcatccaaccccttaataaattggtcgactaaatctttttggtctttagcagataaattcttagcaattactttttcagcgattgctacagaaatatcagcaacttgatcgcgtgcagaattcaaagcgtctgcttttgcctgagcggcatcttcattagcctttttgcgaattgctgcagcatcttcgtttgcatttgctacgatttctttacttgtgttttgcgcgttactcttagcgtcagagagaatttgtgttgcttcttgtcttgagttcttcaaggcagcttcacgctcattagcaagcgtttcagctttctttcgttcactagcagctgaatccaagtcatcaataactttttgccgccgcttttccatcatatctgatactggtccccaagcaaagtgcttaataagaagcatcaagatggcaaaacagatcaaataccagatagcattacctaagtaaatatgtgaggctgcaaataatgtttgaatagtcatttactgcccttctctctttaatactattcctttaaacagaaaattatctctttttattaaaggaacaaaatcaagaaggcaacaacgatagccaaaataggaacggcttcgatcaaaccaacaccaataaacattgttgctctcaagttacctgcactttcaggttgacgagccataccttcaagagtctttgaaataactttaccgttacccaatgatgcagccaaagctgctaaaccagctgcaatggatgcagcaagatatttaaaagcttctgacataaatttatacctccaaaaatttattctgtagtaaccttcttaccaatgtaaaccattgataaagttacaaaaacatatgcctggatagagccaatgaagacagagaaaccttgccaaatcatggctaatggagctgccaaaactaacgtaaatggtccaccagcatgtgctagatcattaccaattaaagttagcaaaacttcaccagcataaatattcccatatagacgtaatgataaggttaaaaagttggtaaactcttcaattaaattaattggaagcataaaaccaactggttgcgtatagctcttcaaatatccgccaacaccaaatcgttgtacgccgaatgtgaacgatagaagcaaggtcatcattgcaaacgacattgtcgctactggatcagcagttggtgatttaataaacatccaatcatcaactttgacttccatgaacatccctaattggttcataaaccaaataaacaggaataaaacaaatgcatataatgacaggtgattttgagcatccttgtcgctaacgttatctttaacaatgccgttagtgaaatcaagtaaatactcgaacacattttgtctcttattgggtttcatttcaacttttcttgaaagccaaatgcagataaataaaactgctaaaaccattagcgttgaaccgataataccagaaagttcaaaattcaagcccatgaatttaaaaacaaatgatttctccattacttcgtgacctcccttctcgtgctgaataaaactcgaacacgtaaatcatcttaacaccaaaaaaggtctttgtgtaaaatgaaagcgcattagagaaaatatttttctaaaaaggacgattacttagtaccaaatagtctgtcaccagcatcacccaaacctgggaaaatataaccattatccatcaatttgtcatcttcagcagctgcataaatgtcaacgtcaggatttgcttcttgaactgccttaataccttctggagcagctaccaaaacagcaagcttaatttccttaacaccacgcttcttcaatgcagcaatggcatcattagctgagccaccagttgcaagcattggatcaacgactaaacattcacgttcagcaatatcctttggagccttgaagaaatattcatgtggcttcaaagtcttttcgtcacggtacatcccgataacggcaatcttagctgaaggaaccatttcaaggacaccattaagcatccccataccggcacgtaaaattggcacaattgtcaacttcttaccagcaatttccttttggacagtcttacccattggtgtttcaatttcaacatcttcaagtggcaaatctctagtgatttcataggtcattaacccaccaatttcaccaacaatgcgacggaattcatttgaccccgtatccttgcgacgaataatagtcaacttgtgttgaatcaatgggtgatccaaaactacgaactttcccatatatgcctcctataaaaaataatatgatcattaaatattttaatcaaaaacgcaaagggtttaaagccctttgcgttttattttttatttattgaaatgatgtccacctgcagctttattcaatcgattcatgtaagctaaactttcttcaccttcatgaaatccttgtacataaatagtttcgatatcatcttgatcatcgaaatagcgcaagccaccaaataagttatggtcggcatcaactaaattgttgcccagatcaaatttatttgcttgaggtaaattaattttagctaagactggcgctaaagctgctacaccagttttttcattaaaatcaatttttgcaaaatcagcaggatcatcaaccacgactaccggctcacttggagcataatgacggtatttcattcctggtgccttaggtatatctttgtctgacactttgcccgtgttaattaaaactttttcacctaaaacttcgcttaactcttctggagtaatttcaccaggacgaagaacgattggtgtttctaccgataagtcgataattgtcgattctaatcccacacgagtagggccatcatcaataattccggcaatcttcccttttaaatcatggtaaacgtgctctgcagtagtaggactaggcttagttgaggtattagccgatggtcctacaattggataacccaatttagcaattaaatcatgagtcaattgatcatcaggacaacgaaatgctacagtatcaagtcccccagtaactgcatctggcagagttcctggtttaacaaacaatagcaatgtcaaaggacctggccagaaatgtttaattaatttcttagctctttctggaacttctttagcatacttagccatcatttcttcgtcagaaacagtaacgatcaatgggttatcacttggacgtcccttagcagcataaacgcccttcacagacttttctttggttgcaattgcacctagaccatagactgtctcagttggaaaagcaaccaattcacccttagctaacaacttaactgcatcattgatttgatcttttttaaaaatcttcgtttccatcattcttatttttgccaccttccatgaaccatgcgtggcttgccggccatatcttttctaaattcgatttcaaaatcaggcaattctttagcaaacaattccttcagttgttcttcttcgctaaaaccaaattctaagaaaaattctccatggctattcaaatgctcacgcacttgcttagcaaatttcttatagaagtctagaccatctttgccagcaaaaagagcttctttaggttcattttgcaagacattttcatccattacattcttttcgcttgtcttaatatacggcggattagagatgatcttatcaaattcttctaagcccaacagcacgttggctttacgagtagttacatcaagatcataagttaaaaagttttcctcacttgttcttaaggcagtatccgttacatcactagcatataaagttaaatctgtaatgccttttttctgtgcttctttagctaaagccacggtaatacagccagaaccggtacccaagtcaaggacttgatcacctgatttaagtgtctgcaatgcccattcaaccaattcttcagtttcaaaacgaggaatcaagacaccgcgttgcaccataattttatagcccaaaaaccaagcataacccaaaatatactgtggagatatgcccttagccaatttttcgatatctttattggcctgcttaatctggtcagcagttaagtccatttcttgcttcagttcaaattcacttggtgtcaagcctaagcgctctgctagaacataatcaacatcctcaggacgcgcattttcagcactctcacccgctttaatacgcatctgctttaaagtcattttaggcattttgatcagccaactcctctaattgcttagtttggttgtaaagaattaatgcatcaataatttcatcaagttcaccgttcatcacacgatcaagcttgttaatggttaagccgatgcggtgatctgttacacgattttgtggatagttatatgttctaattctttcggaacgatcaccagtaccaactgcattctttctcttagcatcgtactgagcttgattttgactttcataatagtcataaacacgtgatttcaaaatttgcattgccttttcacggttctgttgttgactacgttgatcctgcattgcaactacaatcccggttggcaagtgagtcattctaacggcactagaggtcttgttaatgtgctgaccaccggcaccacttgaacggtaaacatcaacacgaatatccttaggatcaatatcaatgtctacttgctcatattcaggcataacagcaacagtggcagttgaagtatgaacacgtccttgagattcagttactggaatccgttgaacacggtgtgcaccattttcatactttaatttcgaataaaccttgtcaccagtaatcatgattgccacacgtttatagccgccaacctcagtaggttctgaatcaatcattgaaaccttccagttttgacgttcagcatatttttcatacattctaagcaaatcgccagcaaacaaagaagcttcgtcaccaccggcagcaccacggatttccatgataatatctttatcatcgttaggatccttaggcaacatcaaaatcttgatttgatcttcaagctcgggaatttctttctcaatttcagaattttcttccttagccatttcaattaaatcaggatcagtttcactggagataatttctttattatcttcaatctcttttttgtcctctttgtacttcttatatttttgtactacttcacgcaaatcggcttcttccttagaaatctccatgtagcgcttagtatcattaataacttcaggatcggccatcatttcctgaagttcttcatagtgagctactagaccctctaattgagccataactttatccataaactaaaaatcctctctatctttcaacacctgggtgaaagtaatgatagcgacaaacaggataataactttcatcgccaccaatttgtacttgttcaccctcataaacaggcttgccattgttaattcttaaattcattgttgccttgtgtccacaataatgacaaatggtcttcatctcttctattttatcagcaaaaatcaataaattttcactaccttcaaatagatgattttgaaaatcgttttttaagccaaaggtcattactggaatattgaacacatctacaattttagcgcattctaagacatgatgtctcttcaaaaattgtgcctcatcaattaacacacaagctagtttaccatcaccatcagcaacatctgctttgttcatctttttaatataatcaaatagattcatatcagcagtaattggaattgcttctcggtgaagtccaattctagaagcaaccgttcctacaccgctacgattatccaagccactggtcattagggcaatcttgcgcccctgtgcttcataattgtgagctactttcaagatctcaattgttttgccactgctcattgcaccataacgaaaaaataattgcgccatgctggccctcccttttaacaaaaagtcttcgccttaatagtatagaggaaaaaataaatttgtgtaggtattaaacctcgttttcatcctcgctctatgctaaacttagacatagttttaaagtgagggatgtacatgagttttaaatcaggaattgctaaagttgccggtaaatcaagctattggtttttgcataatgcccttaagggcggcaccagttttccaggcaaattagcaatgaaaattgatccagaagttttaaattctttagccaaaggctatgaaactgttattgtcacgggaactaatggtaagacaatgactactgctttgattgttgaagctttaaagaaaaagtatggtgatgtgttaactaatccatctggttccaacatgcaacaaggaatcgtgaccgcttttttggctcacaagcacaagagagttaaaagaaaaatcgctgttctagaagttgatgaagcaaatgttaaaatggtaaccaaattacttcatcctagcgtctttgtattaaccaacattttccgtgatcagatggaccgttatggtgaaatctataccacttatgacaagatcgttaatggtattaaattagcacctgacgctacaattatcgctaacggagatgcaagcattttttcatcagttgaattgcctaataagaaaattttttatggctttaaacttcctgatgacaaacctgaaaatgacttcaaggctccagtcaataccgatggtgttctttgtccaaaatgcgaccacattttacattatcatgaacgtatttatgccaacttaggcgacttcttctgtcctaactgtggctaccaccgtcctgatttaacttttacagttaacaagattattgatcaaacacctaatagctcaacgttccaaatgggcaacaagcaatattccattaatattggtggtacttataacatttataatgccttagccgcctattctgttgcacgccactttggattaactgaagctgaagttgctcaagcttttgcagaaaataaacggatctttggtcgtcaagaattaattcactatggcgataaggatatcgatttaattctagttaaaaacccagttggtttggatgaagtcttgcacatgcttaatacagaaaaagatgattattcactagttgccttgcttaatgccaaccacgctgatggaattgatacttcttggatttgggatgctgattttgaaggattagacaaagaaaagattaaaaagatcctcgtcggtggtcaacgctggcatgatatgggctttagacttgaaattgctggctttgatccaggacaaatgagtactaatccagatgatgatagcctaattgaagaaattaaaaaactgccaactaagaaggtctatattctttcaacttatactgcaatgcttgcacttagaaagaagatggccgaaaagaaaatcattaaggctggtatgtaaatagaaaggattcccgcgggaatccttttttgtgtacaaaaaagctgtagctctaatgctacagcctttctaattattgggatattggggctcgaacccaaacatccaggaaccagaatcctgtgccttaccaatttggctatatcccagtaaatcacccgtacgagaattgaactcataactccaccttgagagggtagcgtcttaaccatttgaccaacgggcgaatcaacatttataattatgcttttttcttctatgcttgtcaagtaattttgactataataatgctaatggatggtgaaacatgatcgactttaataaaacacagcatttaattgaatcaatggtttttgaacgcgttgttccaggcgtcaattacacttttatcaaaaataagcaaatttttacatcaactactggttttgctagtatctacccagaagttactcagctgagcccttttgcagaatacgacctagctagtttgactaaggttttagcaacagaaaatgtcttgcttaagctttatgaccaaggcaaacttaactttactgagcccttgcagcaatttattcctgaatttaaagaccctcgtgtacgcctttatcacttgctaacccatactagtggcattcgtggctggatcccccaccgcgacaaactagatcatgatgccttactacaagcaattatcaatctgccagtaactgacgaatttgaacacaagatgcggtatgccgatacaaactttatcttacttggattagttattaaaaaaatttttggcaaacctgtccaagaagtagtcacagagcaagtcctcaatcaaatgccgcttgaaaatactactttttcaccacaaaaggatgattgcgtgcctactgccctagttgatggccatgtcttgcaaggtattccacatgatcctaaagctagacaacttgaaatagattgcggttctgctggcttattttccaatcttcaagacttagttaccttcgcccaaggttatttaggactaaaggatgttttaccttatagtcaaaagactgtcagccagctatttgataataaaaatccccaaggcataaaaccacgctcttggggatgggaccttcggtttgatccaaagcaaaattatccgatcattttgcacacgggttttactggtactttaattattcttgatcgcatcaaacgctctggtctaattttattgaccaatcgagtccatccgactggacacaacactgttttcttagctatgcgcgaaaaaattatccatagttttatcaacgaaaacgccaaaatataatttatagaaaaaagacggctgtgtgtcagtcgtctttttatctctcactaaatttcatcatccgtctagtattataacttattttaacgctaatgtactagtcaaatattatttttctgctttaaacattttccagtagctaattaaaatgattaatgccattaataaagtaaaataaaaggctgcctgactaccttgagctgtcgccagtgcataggacgctgcaccctttttcggccaaatcgacataattgctgctaagatagttgttcctacagaaccggctaattgctggctagtctgacaaactgcggttgcatcggcgcgcgatgctcctttttctaccttcaaagcttcagctagcgtgttagaaaatgacattctgtgtcctaacatcatgatgccataaataataatgatcatcatcacagtcaaatttaagccaaaaatagcaaataacaagcagctgatcgccattaagaagccacctaaataaagtggcaatttagctccttttttatcatataggctaccaaaatatggattgagtagccctgcaataatactacctggtagcaaaatcaaaccaccaactaaagatgtttgctttccgacaatttggatgtagttaggcaatacaaaactgataccaatattattaaattgcaataaaaagtaagctaacgcaccataaacaaacgctttttgcttaaatacggctagatctaacaatttcttggatgattttttagataatctaacaaataaccaaattaaaattgcagtcacaattaataaaatccacattaaaggattagcaaatccattactaatttgatttacgcctaatgtcaaagtaataaatgctatagctaaaacgataaatgatagccaatcaaaactatttttagtttgttcatgatacttaccgactacaaatagcccggcaacaaaaacaatgatcgcaaaaattgtaacaaaaccaaaaatccagcgccagttaagataaaaagtagtgataccgcccaaatgctggtcctaaagtcggtgccatagctactactaagccggcgattcccatgtaaacgccccatttttcgcgaggcataacttcggttactaagttaaacatcaacggtgtacttaatcctgcacctagagctgaaatcagccgacctaacagtaaaataggaaaattaggtgctacagcactaattacgcttccaatcataaaaccaacgcaagcaacaataaacaattgccgcgcagtaaaacgttcattcaaatatgaagaacaaatcataataatcgcaatcgccaataaatatcctgttgtcgtccattgaattatatccaaaccgacaccaaattgcttcatcatcgtaggaaaagtgacgtttaaactagtttccgtcaaaattccgacaaatgacataaacgcagctgataatactgctaaaacatttttagtattctctttcacacaaaaatcctttccacaaaaaaagaaagagcaaaaaacctttgtttcctactctttctttaattagcacagctaattatattaatacgcatactatcaaatatgctgagtatatctaatattaaagacgcttagctaagtcgtcgtgtaagttttcgtaacctggcttgttaagtaaaccaaacatgttacgcttgtaagcttcaacacctggttggttgaatgggttaataccgttcaagtaacctgaaatagcaattgctaattcgaagaagtaaatcatgtaacctaaagtatgtgcactttggtctggaatgttaacagtcataactggaacaccaccatcggtgtgagccaaaacaacaccttcataagcacgatcgtttacgtagttcaagctcttaccttccaagaagttaagttggtcaaggttcttttcatcgcctgggatcttaacatcatgacgtggattttcaacacggataacagtttcaaataaattacgtaaaccttcttggatgtattgaccaagtgagtgaaggtcagtagtgaagttagcgcttgatgggtaaatacctttttgatccttaccttctgattcacccattaattgcttgcaccattcaccgaacattcttaaacttggttcatagttttcaacaatttcagtagtgtaacccttacggtaaaggatgttacgaagtgctgcgtattggtatggagttgcctttgacaaatcagtatcagtgtagtcagcacgtgcgtctgcagcacccttcatcaattcgtcaatgtcagcacctgaagcagcgattggaagtaaaccaacagctgaaagaacactgtaacgaccaccaacatcatcaggaactacaaattcttcgtaaccttctgcatcagcttcagtctttaaagcacccttttgacggtcagtagttgcataaattctcttagcagcttcttccttaccatacttcttgattaacttgtccttgaagattctgaaggctactgatggttcagtagtagtacctgacttagaaattacgttaacactgaagtccttgtcgcctaaccattcaatcaagtcataaaggtatgagcctgaaagtgagttaccacagaagacaacagttggcataccgttcttttccttgccatagaaattgctgttcaagaattcaattgcagcttgggcaccaaggtaagaaccaccgataccaatacaaatcaaaacttctgaatctgattgaatcttcttggctgccttcttaatgcgggcaaattcatccttgtcatagtcaactggcaaattaagccaaccacggaaatcgttacctgcaccagttccatcgcgaagttcagtattagcagcgttaaccatagcttgcatttcgcttaattcattttcatgaacaaattgtgttagtttactactatcaaatttaattaaactcataaatctgcttcctaactaaataaaatatttttcacaaacctattttaacaatcttgatttataaataccagtacattataagcgcattcaggcttttttgacaattttaaaaatcacataacccaaaattgctccacaagtattgaagaaaacatcatcaatatcgctaacccccgtcaccagcaaaaactgcagagtctcaattcccactgaaaacagcatccccatcagtaccgtccttaaaaacgttgctctttttgaaaaaacaatggggaaaaaaatgccaaacggcacaaagcacaagacattgccaaaagaattataaaagaaatccaaatgactgggagcatagactaatttccaagtttccttcatgaataccaagttaatatcactcaatggcctagagaaattaaaatcaagctgccacggaaagtaggtatttctaaaagttgtcagcatcaaaactaagattatgtaaaaagaaaagacccaaacgctagcttcagacctaattgatcttctgcggcgcaccaaaagaagccaaattaagcgcaatacagcaaaaattaaaaaataaaatattgttttatccagcgctaataaggttaatttaactaatgcaaagtggttaatattagttgcatactgtttagctaaaaaactataaagtgggcccaaaaatagcatactttgcctctttccaaaatattcattatagattatacctattttcacggctggaaaatcttaaaaaaaagataactcttagcaaattattgttttaaaagaggtgaaccattaaaattaaaagatgttaaaggagcattatatggaaaaaaagaaaattatcagttttattcaaacacgaacgggctttttaacccttttagttgtttgtttctggctgaaatatatttttgcagcttattttgatttcaatttaggcttgagcgacccgtatcaacatttcattatgtggctcagccccgtagggtccgccatcattttaatcagcttcggtttttatattcctaaaccgctgatctcttacatcacaatgttaattttagactttgccaatacggcattgctttttgcaaatattatctactatcgtcaattttcggactttttaacaattaaaacgatgtctaacgttggtaaagtttcgcagggtctaggtaaaagtaccgttgcccttctgcatccaacagatattattatctggattgatttgatcgttattgttactttactgatcattcataaaatcaaaattgatcaaagatcttacggcttatccaccccatttgcgattacctcagtaggcgcatttgtcctaactcttaacatttttttggcagaaacctctcgtccgcgcttattgcgcaacacttttgatcgctcctatgtcgttaaataccttggtattgacacctttactgcttatgattgcttcaagagtgcgcaaaatgttcaagtcactaaaaatgccaacgctgcggacttgaaccagattttaacttttaccaaaaaacaaaatgctgctccatcttcctcatattttggtattgagaaaaaacgcaatgtgattatcatccacttagaaagtttccagcaatttttaattaatcttaaggttaatggcaaagaagtgacgccgttcctaaattcactttatcaaaataaacatacgctcagttttaacaacttctaccaccaagttggtctaggtagaaccagtgacgcggaaaacatgctagaaactagtacttacggtattcccgacggatctttattcacttctttaggttcggaaaacacctttcaagctgcaccgcaaattttgcgtcaagatggctatacttccgctgtctttcacggcaacgtcggtagtttttggaatcgaaatgatgtttataaaaatatgggctataattatttctttgataaaaattactatagctcccaaagtaaagatgcaagcggctatgggttaaaagataagctgctttttgccgaaagcgttaaatatttagagcagatgcagcagcctttctatgctaagttcattacggtaaccaaccacattccgtttaacttagataaagaagacaaggaccctaactttaagactacaaacactgccgaccaaactatcaacaattactttgaaactgcccactacctagatgaggcattgcgtgaatttttccactacttaaagtcttctggtctttacaaaaactcaatggtagtcatttatggtgatcactatgggttaagtaattctgaaaatgaaaccttagcaccaattattggtgaaagctctgacacgtggaatacttacaataatgttcaaatgcagcgtgttccattcatgattcatgccaataatttgaaaggaaaaattaatcatgaaattgctggtgaaattgatgtcttgccaacactgatgcatttgctcggtattaacaataaaaactatgtccaattcggtagcgacatgctttcgcctaaaagacaaaattggatcgtctttcgtaatgggaccattgtcagctccagatatatcatagttggtgctaaaggaatcaaaggtaccgtttatgaccgagttagcggtaaacaaatcattaattttactcctcaagagaaaaaagaaatctctgagctagcacaaaaggccaaggcatcattagactattctgacttattaaacaaccacaatttgttacgcttctacaccccaactggctttgtccctgctgatccaacccaatttgattattccgtcaattatcaaaaaatgatcgctatcagaaatgaattagctggcaattccacctcgctttatagcagacatcgcggtacaactactaatctttaccgtactgatgccgctgaactaaaagatagaaaacaagaaattacccaagttcctgacagcgttaaaaatattaaagagaatacgaaaaacaaaaatagttcagaaaataccaataactaaaaagaacgcacagacctttcaaaaaaactgtgcgttcttttttagtttttagctacaaactgttcatagcccttgtcataaaaggtcacggtgaatgtggaacctttacctggtgcggaaaatacttctactttgccaccatgttgcttaatcaaagaagaaacaatcgcaagtcccaagcctgattcgccagttcccattcgagcacgcgatggatcagccttgaaaaagcgttcaaaaatatacttagtctgattcttgctcatgccaataccattatccttaaccgataattgtgttccatgctctatccgtttacccgaaataataattttgccatcatgagtgaattgaatcgcattttgaactaagttaaccattacctgggtaaaacggtcacgatctgcataaataggcaactgatcaggtgcctctacaaccagctcatcgttggctttagttgcattttgttttaattgcgacttcaaatcatgcagaataattgtggcattaaagttagtcttaaccagcataatttgattatttcgaatcttttcatagtccaaattttcattgactaaccgaattaatcgtttagtttcgcgctgcattaacgcgattgacttcggtttagaatcctctgggatagcatcgtattgcaagccctctagaatgccattaattgttgtcaatggcgtccgcatttcatgagcagcatcagccatgaattggtctcgtcgctcttcttgagccttaacctcttcgttcgactgcttcaaagcctgcaccattttattgaaattctcagccaattgatcaatttcatcgctatctttatgctcaatttgcacattaaagttacctgatgcaactttttgcgtagcacgtgataatcgcttaattcgtttagttgaataataagaaataataaagctcagcaacaatccaaccgctacagtaattaacaatgcacgcaacaaattgcgtttagccattaaaatcggtcgctcaacatgctttactctcgatcctatccaaacaatgccaacaagatttttgccattcatccatggaaccaaaacccccgtgtaggcatccttagttgaactaatcggtgaattttcattatgattattttgaattctaatctcttgcccattttttaaagtagtaaaaacttcttgtgaaagctgaattctagcctttgttttgggataaatctgctcatttttatcattaaaaatacgtaaatgagcatcatcaccacgaagaacatattctaattgattcaagaagttattgctaagcaatgcagtcccattttggctatcagcttccgccaagtttcccaaagaattagcatagctttccatccgctggtagttttgcgtataagcttgattacgcgcataaccaatctctgagtaaccaataatcgagatagttgtcacaataatgagtaagaaactcaacatattttggtaaattaatttcattatttgacctgcgaatcatcaaacttgtaaccgacgccccaaacagtttggatcaccttggcaccaaccttctctaatttctgtcgaagctttttaatatgagcatcaacagttctttcttcaccataatactcatagccccaaactagttctagtaattggtcacgagaaaagacttgtttaggcttttgtgccattgtatacagcaaatcaaattcttttggtgtcaaacccattaccggctgattatcaaataaaacttctcgtctattttttgaaatcttcaaatgatcggtcgtaatctcatagtcttgattatcttcttgagtatgagctggttcttcttccatcatcacgcggcgatgcaaagccttaatgcgggcaatcaaagcaattgggctaaatggcttagtgacatactcatcagctccgatacctagccccaacacttgatctgattcactgccacgagcagtaagcataataattggcactgtcggcgaaattgcccgtacctctttagctacttgaatcccatctttttttggcaaattcaaatctaacgtaatcagatcatacttatccgcgttctttttaaacatatcgacggcttcgacaccatcaacagcaatgtcttgttgccaaccttcttttttgaaaaacattcccatcatttcagctacggaagtgtcatcttcgaccattaatattctcaaactcattatcaatccctaaatccttttgttctcttatgcttcacttgatcaggatcgacatagtcatgtggcaattcatgtcgtttagacaaaaatgttttcaaacttttttcggtataaacaattggcaataagataaataaataaaatgttaacagccaaatgagaaaatagcgatcccaattcaaatagtgaatgattactcctaacagtgcttgaataaacccaaacaggatacaataccagcttgcccgtttctgagcaaacttaaaactatcctggttaacttgcgcaagataagataaatagccataaattcggttgggccttttggctggcgtaatcagccaaatcaaccctaccgccaccataactaagccacaagcgacatagatcacgatttctcactcctaattctgataaatttaaacggttattcctcacctggtgcagacataactattctcattttaccagtgaaagtgaaattcttcatctcatttggaataattaaattagttcccatcttcaaatcatatgacttgccatcagcttctaattttccttcgcctttgataacggaaactaacaggtatggatgatcctttaagccggtcttccaagtaccatcaaggtcaatttgccacaaataaaagtgtggtgaaagtggtggttcaaccaatgtcttaatttctgcatcttgatcttggctagtcttaacatctaacttaggatcaacatggggaacagtggtcacatcaattgacttttgagtatgaagctcacgctttttaccatccttgcccacacgatcgtagtcatacaagcggtaagttacatcacttgactgttgagtttcaattactaagcatcccttagttaaagcatgaattgtacctgctggcacatagaagaaatcgcctgctttaaccggaacttttctgagcagcttatcccattcgcctttgtggatcatatcagctaattcttcacggctttttgcatgatgaccataaataatataagcacctggatcagcttgcattacataccaagactcagtcttaccagaatcattttctactttgcgagcataatcatcatccgggtgtacttgaactgataaattatcattagcatctaggaattttaccaataatggaaattccttggccttagggttgccaaacaattccggatgcttcaagtaaacatcccgcaatgacattcccttaagtggcccatctgttacagttgacgcgtcatccttgtaacctgaaataatccaagcttctccaacttttccttctggaatatcatagtgaaaaatatcatctaatttacgtccaccccaaatttttggcctaaagtatggggttaaaaataatggttccatttaaatcacctcaattaaagtataaactttaaggcagaataaatgaaacccttttcttagatatatgtatactatttgttttacatgtaaagctacttgttatacttacgaatacctgtagctaatctttgcatcccatccttgaccatcgtcaaaggacaagctagattaattcgaataaaatcatggccatttccacgataaacactaccagctgaaataatcagcccagtttcttggcgaatgaactctgctaattcctgtgaatcagtactgatcttttgcacatcgatccacatcaaatatgtcgcattgcccgaaatgatttgtacttcaggaatgtttttttcaataaaattctgcacatacgcaaaattttgctttaactgttttttcaaagcattaagccaatcatggccttgctcataagccgcaatcgttgctggaatcgccaataaattaggctcggctacttcatcactatttaaaccgcggttaaccatattgcgcaaattttcattaggaacaattgccgtagcagaatgaagagcagcaacattaaaagttttgcttggggacactagtgaaatcacactattttgtgcttcacctgttacagaaaaggctggcgtgtaatctggaccttgtctaaccaaatcaccatggatctcatccgatagtaatgttacatggtattggtgacaaagatccgcaattttttgtacttcttcactagtccaaacttttcctactggattatgtgggttacaaaaaatcatcaaagtcgttagcggctcagctaatttttgttccaagtctgcccagttgatcgaataacttttaccatcgaaagctaaatcactcgacaaaacatggcgcccattattcaaaatggaattataaaaaatattataaactggctcttgtactaaaacattatcaccaatatgtgaaatacggcgtacaattgatgaaatagcagggactactccagtagtaaaaatcatccaatttgtttgtggccgatgattatgttctgtttcataccaatcagcgacagcattaaaataatctgcttgtgggaactcataaccaaatgcacctaatgtcaatttttgttgcattgcctcgataatttcaggtgccgtcttaaagtccatatcggcaatccacattggtaattcatcagacttcacatcccactttactgaatcagtctttgacctatctggtgcattttcaaaatcatattgcatatatctcactaatcctttggtgtttggttcgtatcagaatgaacaatttttgtacctattttcggacaatcaagctcggttttagatggatctaccttatctggatcgataatcaaagtaccaatctcaggtaccgtaattttaccagaaattgggtttttaatactatcaatctttgtattaagctccacatctaaattagaaacatattcaaaagctaaatctgtatgaatcaaggaaccattcttaatctcaagctgatcaatgtagttcaagccctgatcactttcaattttacaattaattaacgtaatgttgttagtattccaagctaaatattcaccatcaataattgaatcgtaaatagtgacattattgcaattccaaaaagcatctttagagataaaagttgaattatgaacttcaatgttttctgcaccatcaaaaacataatttcccacaacggaaacgtgatcaagataaatattctggctatctttaccaaaataatcaccattaatttgagaattggtaatcttaatatcattacaagtccacattgtttcttctgcgttagcaaaatgaacattatctaaaataatatgacttgtccttctgaataatttaggtgcctgtaaagcactatttttaattgaaatattcttggtataccaaattccagaccgtgacatagtttcaaacgtggtattttcaactttcacattttcatcataccaaagtggatatttccatttaaaaattgaattctttaatctgatatttttagcttcttttaagggagattcaccactgccaaatgtaataccatcaaggattgcatcagttaatccataaagaattctttcacctgcaaaatatttatttttgtattccataattgtttccacctttttgttaatttaataatcattaattttaggacagtattcattatatgatttctttcatgcaatgtttaatacttatttttagtgataatgcataacaaaaatgcatagcagataaacgatttagcaaaacaaaaaaccgctctagaacaacatctagaacggttatctatggagatgaggggagctatctttacttttagttacttttaattacttctaagtactgaaattaagccattttgatgtttgttggttttagttaattttgaagttggatacctttttggataccctggctaacaataaaattcagacttagaagctttgtcttagctcccaatacaaaaaagtcattctatgaaacttgattctagaatgacttttaatacaacaatacatatagtttaaatacgcgtggtgctagttaaatcgttttagttaataaaaaagtccaattagactagactcaagttgtaagtaatttaaatagaaaagagtctgatctaattgaactatctcaagcttaatcgtttttctcaccatttacaagttagttttaatcggttaaatgtgatttgtcgctcgctgtataagctttatgcgcctgatggacttaaacatcgtaaaaatgttgatcagaccaagcttcctgatagttctatcttagcgatgctcatttggcaaactgaaattggaattgaatctcaacgaagattctgtaaattcttcgttggcttatctcattctcgttttaaccgtcgagctcgaatgctcttgcctctaattcgttgtatccgtcagggttggaatcaggaagtaaaggtaggtggagaattattgattatcgacagttttccgattccagtttgtcagcctgttcgcaattatcacgttaagatcttccgtggcatagccgatattggttataaagcgacgaaaaaaatctactattatggcttcaaagtccacgcaatagtgagtgatgatggctatctgcttgactacgcagttactaaggcgtcggtacatgatgcaaaagagacggtagaattgatgatcaatgctcatccaattaaccattatcttttaggagatgaaggctatttaggaaaagacttagcagccaagctaaagcgtatgggatacgtgctttggacaccatatcgtaaaaacatgaggggtgctaaaaagcataatgatcatcagttaatggcaattagaagaacaatcgaaagcgacttttctttgcttagctattacaatgctgagaataatcgagccaggagcttagtaggttttcaacaacggctagaaatagctattttagcttataatatgacatattgtctagaacgatttaactagcaccacgcgtatatagtttaaatatatgttgttagaattcattgtctacaacttgccttgcaaaatcacatcattcaagaaactagaagatgagctatatccatgttcttttgcaatctctgtcaatttagttcttgcacttggcatcaaactaaaagtgtaaggtcttctcttttctcttttaatataattacttgattctttagaagatatttccttaccagagtcatcattaactctaggtgtttccttcaatacttctgcaaactttttgccttgatttgggttaaaactcatagaaaaaatcccccttaatcattactgtactatacctaatttcttggtacccaaaacaacatatcctggcgcttgtttaaaagtcgtcatataagtgatcaagcaatgaacctcacgccctgtgtaattttctgttgttggatcatattcttctagcaagagtaaatcacctacttgataattacgatcattttttctaatttcaaaatttttagagttatttacttgtgcttcaaaatagctcgggaaaatttttaccctatgttctttgatctcgtatacgccactcgatgtatatactttcattagcattacctcatattttatttatacattacatatacttagtttatatttaatgtatatttgctttatacattatttgtaatgggagaccgtaaaatagtttgtgtaaggatgaatgattccttaaatttatttctttaaacattagaaaaaggagttcctttctcgtatgattggtttgaacaaaaaaacacatacagaaagaagaactccttcatgaatgattttaccaaagattttgctcaagctctattcaatccagacaaaataaatgatttattgcgcaaagagctacaacaggctgttaataacttgctagaagctgagttgactgcctttctaggctatgatccctatgccagaaatggctggaatactggcaattctagaaatggtgcttatttccgcaaggttgatacccagtttggaccaattgaagtgcaagtgcctcgagaccgcaacggtcagtttcatcagcacacgctgcctgactacaagcagcactctgatgttttggaaagcacgattatcaagctctactccaaaggcgtaactaccagagaaatcgctgacttgattgagaaaatgtatggcagtcattatagtccagctcaagtatcaaatatttccaagcagatgctccccaaggttgaggcttatcacaagcgcaagctaagcgacaagtttttctgtgtctatttggatgcgacataccttcctttgcgccgagaaacgtttgagcgtgaagcagtatatattgccattggcattaaacctaatggacataaggaagtcattgactactgcattgctcctagtgagaacattgaagtctggacagagatgcttcaaaacatgaagtccagaggcttgaagcaagttgaactctttctttctgatggtgttgttggcatgaaaacagccttggccaggacttatcctaaagctcattttcaacgctgcctggttcatgtcatgcgcaatatctgtgctaaagtccgggtggatgaccgcgaaaagatcatgaacgaattcaagcagatacatcaacagacaagcaaaaaagaagctgcagctgtcttgcacaaattctatgccagatggaataaagcttatagcaatgtcatcaaaggtttgaaggaaattgagcccgatctgctggtcttctacaattatcccaaacaaatcagagcttcaatttattcaaccaatatgattgaatcctttaacaacgtcatcaagcgtaaagctaagcctaaggcagaatttccaactgaacagtcgcttgatgcatttattggcatccaggcaatgagctacaatgaccgctatttcaaccgaattcataaaggctttggtcaggttcaggataccttagaatcttattttgaataaataattaaaaaatcaatttgcgagaaagaactatttacacaaaagatttgacaggttctattcatatgctatgtataagttatttatgtttaacttatatttatattatatatcatatttacaatatttcaacaactatcgtttttatttttataagaattcaagtgtaaaattaaaaaagataaaattgctgttttctaacaccttctattttttaagctttatttgtaccataatgacatcatttgtatgttataatgatgtcatagcgtaaaggagtgattgttatgacatcatcaactacaatccgtcttgatgacgatttaaagagaaaaatgcaaaagattttagatgctgcaggcctttcaatgaatgcatactttgtaatggcagctaaacaactggttttacaaaaaaagttccttttgaaatcttgactgaaccagaaattcctaataaaacaaccgaaaaagcaatgcttctagctgatgccaaagatgagggcttggttacagatgattcgcctagttttactaatgtcgatgatttaatgaaatctttggatgagaactaatgtacactatcaaatacgagccacaatttaaaaaagactacaaaaagttcaaaaaagaacatccagagttaataaaagattttaagaatacagttattcagttaacccaaaaaggaaaagtcggaaaggactatgaccttcatccgttagataaacgtggtggtaattacagtggtcattttgattatcatttaagtgaaggaacggtcgatgttgtagtgatctacaagccacacaagaccaattcaataattagatttgtgagaatcggaaatcatggagacctatttgagggtaaagaaaaataaactatataaatacggatatatcagtatttttgatatatccgtattttgatatacgaattagaaatttagattttattctttttaaaactccgctcaccatgttgaaaaatcgataaaaacaatgctaaatgtagaaaaaagaaaaaatcatagtagtaagactttaaaaaggacggtagaactactttaagtactacaaattacaacaaaaattttataaacttctacttcattaagaaaaaatcctgtaatacagggctttttaagctaaaacgcaacttttacattttattaattagtgattcagtagttaaaatttctctatccttatactttacagcctcagcaatcgtcagtttttcaattgctctaatgtacttctccatgtaattaaagtctaaattttttgtattacttacaactggtaatcttacactatcacttcttattttggcttttgaaatggagtcatcccaactatattttttagataaagcttttctaacacttcctacaaaatattgttgaattagagggcttttatatcttgaatctttaaaatatagtgccaaattatgactatcattcgaacaaaaatctttttcttgataagttactaccatagtttttccaccaatgaaaacgcaattgccctcatcgatccattctttaggacaatttatgtattttaaaacagcattattgccttctgctgctgtcaagtatggcacattgccattttcaaggttagctacttgactcttcaatatactatgagtattaactacattaaatagatcaactattttaaattcttgaaatattggcttatatgctaatattttcttgtcttcatcagttagtccatagtcatttaatcctgtagcttttaaataggaatcaagctcggcgagccgttgctgttcaagctcggcgagccgttgctgttcaagctcggctatatattgttccatataattaaaatctatttcatctgcatcagttacaggtagcctcaccttagagtctctaaacacattatccacgtgtctaacaagaacagacagtaacaccttagacaatctactaaaaatggtattaaagtacaacgcaattttagtattaagtttaaatttgggaataattttccttacgaactgtcctgcataccaagaacgttctcgataaaagaaagtcatttgtaacagccccaaactaaacgtattaggttcattgtaggggacatcacatacaaagtctgttgtgctttcaatgccattattcaaagatgttcgggtaacatagtcatattcatttgtacttatattaggatttactaatttagacttgttgataccttttaccttttgtatttcaaataaatcacctaatttaaattccttatacttaaccattctgaccacctataacttgactaaccttccacgatagataatctgccacagtccttttaaagtcctcttctgcaggtgttgtgtcaatttttaaatgctggttataagtccaatcattgccttctagagtgattgtatctttaattactttatggtttcgttcagtatagtaattcgttttaggctttttatcactaacaattgcaactacttcttcataacgttctttggcatgatctgtatcacgtaaattaaccttctgaccagattttttacggttcattctagtatatccatcttcactaaaatctaagaaggttactaaatcatcttcttcatgtggtctagctactttaaatacataaatagcagtctgaacactagcttttccaccaaataaatcagttggcatatgaatagaggcaactaaagtattatttttaagaatattttttgtgtaaggcagcccgttgccactaccagcgttttcttgaataataattgccgcatagccttttgtcatttgtgacaatgcttcttgaacaaaaataaaaccttttccttctgcagagtatggaggatttagcaaaaacacatttgctggaaactgtgtgtaatttttatacagctcatgactattaccattaaccatattgctagatccatctcccattaggatcatgtttaaaacggctaaaatgtaaatattgcccagtatttctacacccagtaattgattttctttaatattttgaatcttgcactctagtttctgtttatcttgaattgtatttttagcatccttaaccataatatccattgcagacactaaaaatcctgcagatcccattgccaaatcccacacaaacgaatctttatttgtatgagctaacctagccatcatattcgttatgtatcttggtgttaaaaccacatcattttgacggtcattatcaattgatacccaatcatttagagagttcaaaattttaccagtaaaatctaaatgcaaatttgattcaagcaaaggaagtatatcattatagacttgcacatatatcttatgaatcaaactttcaccatttttaggttgccataaagcttgtttagtaaaaataggttgtaacaaagccataatcatgttaattttgctattttccgcttttcttgcatttaggaaatctgcaatatgatttaagataatttgtccatcattgtttctttcagttatatttccttttaattcagcaggctctaactgtgatactccttttgtctgtagccccgccatgattaaaccagtaaaaacatacaatttttcattagttgtcagtaggttttgaattgacttatcgtcgtacaaagcttgatgaattgattttatccttttttctaattcatcctcagtttctaatttaattttttcgagttcatggtcatttagatttagtttgtctaatatgccaaaaagggtatctatattgatttgcttaaacaaatcaaacgatgaatctagctgtctaatatgttttggaacaccagcattagccttagaaatataataagctttctgctcaggatcttttaaattgccttcagtatctaaagtagtaccattaattcccattatgataacttcatcacagtctgagttatctaagatcgcatttccataatgcagagcaccattagtagcatatgtagtaattgcactataattaggatcaccttttttatgtggattttttgcgttcggcttagaatctgaaccaaatttagtcacttgaacaatttgaccagccttgtctaatttttctaacttatttttgccacctttagcttcaatcattactggtactcttcgtgaatgattatcttctaataataattgaatatcaggataattgttgcctgcaccaccagatttagattcagcttgtcgcaaggctgatgtaatttcactatttatttctccagttttaccgtaatgcctaattcctagactatcaagttcactcttaaagtattcttctactttttcttcaattgatctaaccatttatcgcaccgccttttgttgcatgcagtgcgtaaatgttgacaaatgaattatttgcccataattgatgtgatgtgatcattttattctcctgttcaattcttgcaatggttgattgaattgtatgtaactttttagctaattctgtttggtgttattcctgcgtttcttcaattaatttatctaatacccttttttatgggcaattccactagctatatgattttactttttttattatatagcatgtcaacaatagtttgccatactaaatggtttttaggatcttaggcatttgatctttatttaaaactaaatttgtgaatcctattgaaaagccgtcagaaacaacactaagtgtagaaaaaataaaaaatcatggtaatacgcgtggtgctagttaaattgttttagttaacaaaaaaagtccaatcttgttagactcgacttgtaaacatattaatagaaaagagtctgactagattgaactaccctaagcttaagcgtttttctcatcctaacacaagttagttttagttgtttaaatataatttatcgctgtttgtacaaactttatgccccagatgcattaaagcaaagacggaatatcaatcgatgtaaaatatctgacagttctattctggccttgcttatttggcaggctttattgggcgttgaatctcaaagaagattttgtgaaaagcttgttaatttatctcactctcgctttaatcgcagagcacgcatgcttttgccattgatctatttaattcgacatggccttaatgaggaagtagatctgtcaggcgacattttgattattgatagctttcctgtgccagtctgtcagccaattcgcaatcgtcgagccaagatctttcgcggctatgccgatattagctataaggcaaccaaaaaaatctattattatggttttaaggttcacgctattgttagcgacgacggctacttgctagattatatcgtaaccaaggcctcagttcatgatgctaaggaaacagtagaactgattactaacgctcatcctgacaatcgttaccttttgggcgatgaaggatatttgggcaaaaacctgcatcaacgcttagagcaaatgggctatacgctttggacaccatatcgtaaaaacatgaagaatgctcaaaagcacaataagcactatttaatggcactcagaaggaccatcgagagtgatttttcgcttttgtcttactacaacgctgaaaataatcgagctagaagtttagcagattttcaagagagactcgaagttgccattttagcttataatatggcatattgtctagaacgatttaactagcaccacgcgtattatataagtttatttagatacgcttagcatggtcttgtgaatgagcattgttttgaccataatatgcattctcaccatgcttacgataatagtgcttatcaagcaagtattgtggtaaatgactattagcgtgggttaattctaatgtatggaagtcctcttctgctacgacttctaacacttttgcattatatactgccttagcaggtgtttctccccaggtaaatggtccgtgctgggaaactaaggtgcctggagttgcttcataatctaaatgacgctcttcaaaagtctttacgatagtaacacctgtattaccttcataatcttcttcaatttgttccttagttaaggcatctgcagcaggtatatcggtatagaaagtatctgcatgggttgtgttcattgctggaatatccattttagctgcggcaaaagatacagcccaaggtgaatgggtatggacaataccaccaattttagggaaatgattatacagatacgtatgagttggggtatctgaagatggatttcttgttccctccactacttcacccttcaagttaacaactaccatatcgtcaggagttaattcttcatatggaacacctgatgtcttaatgacaaatagacccttttcacgatcaattccagatacgttaccccaagtaaaggttactagtcctaacttaggcaattgcatattggcttcataaacttctttttttaaatcttctaacatgattgaaccactttctatctcactgaactgagttttttattagtttatacattttatctgtatcagtttcgcttaaaatctgatcatataatctacgattagtaataatgttaattaactgtgttagtgccttatcatgctcatggtgaaagccaggaacaagtacaatgacacactttattttttcttctatattattaacggaaattttaataggtctttttagaattccaatttcaatttccatttttcttgtatgcttagatggtgctgcgtgcgctaagaatgtatcagatgaaagcaacatatatgggccatatttatcaattaaactcaagatatcatcacaataaccagaggtaactatattctttttttctaactcttcagatagctccttaataataggattcaaatccgttccattcattagattgtcaatgatttttatactacttctattcagaagatccatcaaattgtgtttatttttatcacgtttaacagtatcttttgtaggatatagataattatctaaatcttttcttagattagaaatattctttatttgagcatttctttgaataatgctaatcaaattatctaaagtcttttctctattaatgaataactgagggaaatagtatcttaattgattctcaacttttacatgatcctcactgtccatcattgccttaacttggactacaggtaaatcaatattttttgtatttaatggagaggttgtaatgattaatttagctgtattagggatgcgtaaaattttatttaattcatcgatacttagtgacttagaaaatgtgattaatggatattgtttgtgcaaattagaataaagaatagcagatgaacttacgccactagtacatactaagagaacttccgattgcaagctatctctaatattatcgtttctatctaaaacatgagatatattatctgatagatcatcgtatgaaatgaagtacagactgatcaaagcaatttcattaattgaaataggtttagaaaacagcttagctaatggactacaagataattgtacaaacttaaccatttctgggaatttatggacaacatcagataaagcttcagaattaaagtcaaaattaaacttacttctaaaataactggcatataagtgattacttaaggctattacaaactttggagattgaatttttatgcctgaaatagaagcgtatctattaacaatgtcttgcgctacatctaaaattttgtctttaaaagattctgtaacgtaattaactgcgtcggcttgcgagcaaagaattaattcactaaaaaataaaatttcacttttaattccaatcccatatctttgcgtaaagtctgtaactgcagataaaacattaacggtactctcttgaatatcattatctgttatatctatgtcaacaatcatatttcccatagaaattcgccatattctaaatttaagaattctctttaatttagaaatagcgttttcggtaaatcgtgaggaaatatcttcctcgagaatttctatatcactttttacttttgaatcttcaataattggaaatggtaacttatctattttgtgtgctattaatccactattatgtttttgcagctcattgaaaataaaacgacttttctcttcttcagaactttttagtagatgaccatttgagtcaatatttagctttagttcagaataattttgtcgaatgtccttcaaatcatttattatcgtatttctagaaacatccatatcatcgattaattgattaatagttattggactattctgaataaaaaatttccagataatttccttcaatctgttttgtttattttcgttatgttgaaggttcttattttcattgatgttttgttgcttccaagcacttatagcttgtgcattgagtatatagcctaaatttctaacattttttataggggtaatatcttttgatgttaataaagcattagccttttttatccgataaaagattgttcgttgtgagacatcgaaatagttacataattcatctaacgtcacatatcttttttgctcagcaaaataattaattaaattgcgggtgtcaattgattccatctattatccatatcctaaaaaaatcgttaagacaatatctaaaatacttgccttaacgatttctaactctttaaactaacctttgataatttcttctacttgatcaataacgtcatctacgccaattcctgtcaataatggcaagccatttaaaactggaatcttgatttcatcattgtcatattgagtagtagtaatagcagcatctgcttcatctgccattgattgtacttgttgtacacttgtttgaactaatttgtaatcagtaccttcgttaaagcctctatcagttagctcttcgtttaacttattcatggctgctgtactagtaacaacaccagcgccacatgcgacaataatctttttcataattaaatcctcctaactttattaagcttttttagctgcttcagcttctttttcagccttaataatgcagtgacggttccacattactaagataccacaaactacaataccaataacataggcaagccacttattgtgtgccatttggaacaatatccatgggaaaggattagattcatagtcaattgatccaattaatgttgagttctttggaatagcaaagtgagcagctctagcagccttagtaaagaatggtgataagttagtaccaatccacaaaccaatgattacgttaattgcaccaataataaaggaacggaagaagtcgccgtgtgttactgccacaatcaatgggaacatgaagacaaatccaacaagtccaatggttggtaagaatttattgcctggtaaaatgaaggcaaataccaaagataatggaatcattaaggtagcacaagccaatacaactggactaccgatacctactgcagtatccataccgatgtagaattttctaccaccaaagcgtttttgagtcaatttttgaatattattagatactggtacaacaccttgtaataataatgcagccatttttggggtgataatcataacggctgacatagttacacccattaacaaaatcttacctattttgtctggccaatccatacccggaacaaagccatatgctaagaatccaactaacaaaccaattacgaaacctaaaagtgtaggttcaccccagttaccaaacttcttgttaaagtctttagcatccaagtgaatcttgttaacaccagggatcttatcaataatccaattaattactacggcaaatggtacaaaagaacctgcatatccatgaggaattgagattcctggtaatcctaagtacttttcagacaaaggtgcagttctgtcggcaattaccatgattacgaccatgtttacacttgctaagaaaagactaagcaaaatgtcatcagtcaaggcatatactaatgaacctgtaaaagcaaagtgccaaaagtcccaaatatcaatatcaatggttgatgttgttttggtaaacagcataatcatgttgataatgatacccaatggaatcattgtaacacctacaattgaaccatatgcaattgcagatgctgaaggccaaccaacatcaataactgacaaattgatatgcatgactttaatgatttcttgaactgctggattcataacatcagttaatattgtaacagttgcatttaatcctataaagccgattccgaccattaagccgcctcgaagtgctttagcaaaaggtaccttcaaacataacccaaaaatcaaaaagataattggaatcattactgttggtcccaagttgactatatactggataaaatcaactacatatttcatttaattccactcccttttagttaaagtacgatgctaatgcatcatataattcttttgaatctttatattccacaagctttgacattagttcttgttcttggaacatttccataagcttttgcaatagttgcacttgactatgtggttctttcatagctagcattgctacaaatctaacttcaacatcttttgatttatcagccatatttttgaaaaacactggctttttcaatgtagcaaatgcaataactggcttattcacatacttaacatcagtatgtgggattgctacgccaccttcaccgcttggcaaacctgttggaaaaatctcttctcgatctaaaacagcttgcttatagctttcagtcacaaaaccttgcttgaataactgatcagctaatgtagaaatagcatcggtagaatcactaacatctaattgtgcaaatactaaaccatcttttacaaaactcaatcttatttcacttcccacttcattcatcacattcatagtaaaataaaaccgcttttataaatagttcaattagccaaataaataactgcaagttctgcaccccttttgcatgcataacttgcagttttattgctcttgtgaaatttgtactattctattacacatttgcctttgcagttttaatggtaaattacaaaatctataaccattaattctgaatgctcctgtaaattaattaattcgaaattattatgaataaaatcagaaattgcaataatattgtccgcacctgttattatttcttccttttttattagctatttcaactaaatcaatctttaatatttcgccattaagcaggtatcgttcgactattttagattgatctactaaattacacattttgaaccagctaagatgatttatttcaaaatggccaataatatatgcatttacagccatttctattgaaaatacgtctttaatcattttgaagccttcttttaaatctatgccgtttatttgctaaatcttcttgcattgccaagattattacttgtcatagattaagtttttctttttgtagaaagtcattacatgctttaatagcagcaagaacaaaattagtcatttttcctccagagattttgttacctacaggctgataatctatttcaccagtctcatacaataaaatacgcgtggtgctagttaaattgttttagttaacaaaaaaagtccaatcttgttagactcgacttgtaaacatattaatagaaaagagtctaactagattgaactaccctaagcttaagcgtttttctcatcctaacacaagttaattttagtcgtttgaatacaatttgccgtttgatatacaaactttatgctcaaaattcattgaaacatcggcgaaacattgatcaatgcaaaatatctgatagttccattttggctttgcttatctggcaagctaccctaggcattgaatctcaaagaagattctgtgagcacttttctagtctgtctcactctcgctttaatcgtagagcacgcatgcttttgccattaatttatcaaatccgtcatgctcttaatgaagaagttgatttatcagatcgcattttaattatcgatagttttccagtaccattctgtcagccagttcgtaatcatcgtgcgaagatttttcgtggctatgccgaaaagctactaaacaaatctactattatggttttaaggttcacgctattgttagcggtgatggctacctgctagattatgtggtaaccaaggcttcaattcatgatgcaaaagaaacaatagaattaattgccaatgctcgacctaaaaaccattatcttttagctgatgaaggctatttaggtaaagaactgcatcaacaattgatgcagatgggatacttactttggacaccttatcgaaagaatatgaaaaatgctcgaaagcacaataaccaatatttaatggcactcagaagaacgattgagagcgacttttcgttattatcttactacaactctgagaacaaccgagcaagaagcttagcaggttttcaagaaagacttgaagttgcgattttggcttacaatattgcatattgcctagaacgatttaactagcaccacgcgtatggtaatatatgaaagtacaaaagaagaaacatcttgcatatgcgagaaaattaagacacacaaaaatcgctactctaagtccacaaatgagtaacgatttttttgtttcaccaaagtttaaaacaaaaaagctatatgcattggctaaggatagtgacgcttgtgatgttttcttgagttttgcttatggattttacgcctatggctattttgagcaaaaatcaacttttacattttattaattctaattgctaatatacttacttaatcttgacgcaatgcacctttaaccaatctgcagcaaaatacatattctcttctgaatcctcactattagtaatatataaaataaactttaatgcatcgtctttatcagcttttaagtgatatccattttcttgtaaaaaaaacgccgctgcataataggaagtccgtttatttccatcagcgaagatatgctttttagtaatcttctgtaagataaaagccgcttttaaccataatgttggatataattcacgtccaaataatatttgttgtggctgtttaacaacaacgtctaacccctctggatactgcacacctacagtacctttaccagctttttcaagcaaccgttgattcaaatggattaaatctgttttggttaaatagatcatttattctctaactctcgtgttaattctttattttcttcataaaattgatcaataaagttgtccaaattgggattaattgaatcaactattttaaacgtgatcttcttaccattaggatcatattctttttcaagaactgttccatcttctacatgaaacttagttaaatcttgcttggttaaacgtacactcaatgaattaccagctttaaaaactttagttgtatcttgtaacattttaatcacctgctttgccatttaattgttataacgcaataatacgatgttataacgttaatgtcaatattttaactttttttattatatagcatgtcaacaatagtttgccatactaaatggtttttaggatcttaggcattgggtctatatttaaaactaaatttgtgaatcctattggaaagtcggcagaaagggcactaagtctagaaaaaataaaaaatcatggtaatatgaaggtacaaaagaagaaacatcttgcatatgcgaaaaaattaagacacacaaaaatcgctactctaagtccacaaatgagtaacgattttttgtttcaccaaagtttagagcaaatatgtttaatgctttagctgtatgttatcacgaaatcaagtggctatcataatattgtctaaagtcctcggtactgaaagcacctgaagttatttgtacaatttcattaagcgctttttgctcactgcattttcgatatatcattagacgctttgttctaatcctaagcgaatgaagcatccattttatattctcatccaccagcttataatggctttcaattaaaagagcttttgcggctttttcatactcgtctttcttcatatactttctcctataaactgcttatcaagaacacggctaaattattgccaaggtgacttacgtaagagaaggtcaaatccttagtttcaagataaactaaagctaagacagacccacatagtgagtacaaaatggtatataaatcaatttgtggttcatgtaaaagtccaaaaattaatccattaatgagaacagcaataaataatgttgtttttttgcctggtttactaaaaaaccaattgaaaaaaacacctctaaaaataatttcttcaaaaagtggtccaattgcaatcagcattatattaataattggattcaactgttgctgatgtgcagctatgtttgcttgattagtggcttcccctttaatcaaaaatcctgctaaaatttgcaaaatacaaattactaaaaatccaagaaaagctaaactccaattttttaaagtaaatcttggcattctagttttattgtaactagtaaagtgccaatcattcacctgattaagtcttctttggtaaattccgtaggtcaagctcagtaatgcaaccgttaatccaaatataaatataacggcaacccagcttaattgtttggctctaatcataaataatccttgaactaccgcataaataaggaaagttactatcatttgaccaataccaattgatttatcaagaatcttttttttcatcttttagttcctttgatttttttatgtctgattttagataccctatcgacaagagaaaaatataaattattactgaaataccaaagccgaccgtcgcaaaattaatattggaatttaaatgcttcgtagaaaccttgcaaattgattgcgccaaagcacctgcgttagcagaaacaaaaaatgcaaacatagttgcaataaacagtgctgttcgtcttagaaaggacaaaatcatatttattttcataaactacctctacttagcaaatttctcatcaaaaccaaaatattttctgccattgtatttcttattgggattaggcttaatctccattcgataggtacctttacgaccattgaaagctacaatttgcttttttcctgccgcaattttcttaatctcttcaggggtccaacgatgacctcgatatgttttcttaaaatgatattctttaccgtctttatatgtaatcactacatagacatttgtatctacaggtttaggattaactctaaagccccagaacctgattttacgtctaccttctttcaattcttgttctatcaattttccagtagccgtaaagctttttccttgcttatcagtcgcttcaaaactgatttcttcacctgccaacaagctggtaatttcttcctcactaaaagcatgttgtccatattcttttttaaatttaatctctttagctaaaggcttatagattcctttaacgtgatcagtatcttcaggaaactctactttccaaccaactctggtaatctctttacccgtttttttacttttatacgtttgttcggctaaataagccgtatgttgttcttctttaccaaatttttcaatcgaataggtgatttgtttcccttctaaagcttcttgttgctccacttcagtagtcgtatgtccatcaaaaatcgtaactggtgggtttactgtttcatttgtttgagtaaagactccgctaaatctttcaattgcctttaaatcaccagctaattctttaacttgtgcatcttgatttaataatggggcattttctatcataactgctttatcatgttcaattgtcttttctgcaactgagtagaccatatcttgctttgtgggatcagccttaatttcattcaaaatgtcttgcaagcgttttgtaatttttcctgaagacaaataggtatctttagctaagcaagcaatcaatgcgccagttcctgttacttcaaaaacacctcttactacttttaattggggaataacttttttattttctttaccaattgcttgtaatttactaattgtttgcattttagtcgcaccagtacccaagttccatttatccaagttattcaaaatgaaagttaaagtaggtttagttggtggcgtatttgtaccttgatatacttcagggctagcgttttgagcaaaatgtgtagccttattttctgattgcttttcttcatttaaatcattttcgttaaaaatcagcttatagtttagttccttaggaacattaatcgtacttgtaaaatcaggatgatttgcaatatgggctttaacttgagtatatacatagtcctcagctaacattgctagatatgatttaacaactcgttcataaatatctcgaccacatttaccatatttgtcttcaactttttcaagtgattgtggtactaatttggtcggacgattggctccgtgatcctcactcttaattatgaattttttgcgtgggtctttatgacttaagagttttgaatcaattccaacgactgctgcaattttatctgcatatggtagtaactcgttaaaatcatcaatcgtaattgcgttgtcttctgttctcggataagaaacaatcttatcatcatacattttttgataagtatcagtaatttgttcagttgtatattccttttggaaaatcttacctaagtcagccaagttgactaactttggcggctgggttcttttttcagttgtgctatcaataataatttgatcttgagaataattagttaaatcttgacctactagatttttgtctgaaaaacgccaagtatcaccgtcttgatagtcacgcttaaatgtattgccgtttgcatccttataccttatttcatagaaaggctttttaacgtatgattttcttgctctgttttgctcatcaactaagcacgtaatatacgtctgcaagcgtcctattgaaagcgccttacctttattactataaccctgttctcttgccaactcagttgcaattcttgattcttctaatcctgttagaaaatcaaatctctgtcgtgattttccttttactaaaattccttgagcatcttgttcactaactgtagccttctcaggcttatgtaaggaatcaattacatagttagctgagtcatcacctttaaaacgaattcgccagacttcattttgccagtttaaataatctactatttcccaacctaatacatcaccttcaccagatgggtcattatcgcttgcaataataattacatcatgtccaggcaaattactcttaatattatcaatgtatctttgcttggacttaataacttgctttgaccaatttaaatcgagaggattccaaggaaagttatctaaattctgccaatccgcatatttagctgcaaggtttgggtcaaccatttcattaggcgcattgagttgtaataaatgtcctgcggcataaacaatatcatatggatttccttcaaattcgccactcattccacctaaataatccgcaaatttttctgcttgagactttttttcatttaaaataagtaatcttgtcacgttactattcctttctacaaaaaaagaatacctcacggtattcttcacatagcatactcattatccaaaaatagattaatggaggtatttatattatatatcatttttgtaatatataaaagactagttaacttgtttaatgctttccagaatgactttattcatttgactaatcatctttctaaagtagttgtacaattgttgatcattgttacaattgaggtacttagagtagaagtagaagtcaattccattgctctctagctttgctttttcttcctgataaatcttgtcactaattacataaccataattttttagataatcttggttaatgtaagtaataaagtcactagcttgatcatgctttagatttttaacatcaaaaccatatctaatcaatttctttttgatcacaatcaaggtatctgatttattaagttgtgctggttgaacgatatcaattacataataggaattggctaagtccttagcataaccttttttattaggtctaacaacgttgaacaatatatcttctaatcttgtgacttctttcataactgcctattatttctccttaccataatataagcatcttatttatatcatatattacatttatagtatacaatattgcactaactaaaaaatgaggcacaagattatattgttacttatatattaagcataaataacatatatgctaattataaacgcgcaaaaaaacagccagctttaaatacaataactttaaagctggctgttttaacataaaattattttttagcgtttttacgaagaaacttaactaatctatgtatgtcttgatcgcttaatctacctatatgtttaacattagtatcttttttagataccgagtaacgtctataagtatcaatccatgaatgtttttttaaacctgtgttttcatattcttttatttcaaaataatactttctaattttttggggtttattcttaaactttgtcgttatgtcaaagaaaaagaccttatccccattttcttgtaatataaatattggtcgtcttttaccacctgaagcctgaacgaaacgaacataagctgtagcaatatttttactcatcttttgacatccattcttgcagtttctcagggctatccaggtcttctgttgcccaatcttttgttaagttttgaatttctaattcatctttctctctttcagttaaattggttggaaatggtaacccattctcagcaataagacgcttatagaacattgtgatagcaatagtaggtgttaaacctaatttttttagaacagcattaccttcttctaccacaccatcatcaatttgtacttgaattctctttttagtaattgaagccatagtagtgcacctctcatatcatctatactgatattatactactaaatcagcaaaaccaaattatataagagtaataattaaaaattatttacttaccacttatttcttttttatataaaaaaacagttagttttatattaagtatttggttttcgatactattatctatctaattcccgctcatctttttgaattgccatttcttttgctttttcattagttaacgtgctgtttactgtagcaacatgtggcttgctagtttgcacttctttatcatcaagcaatttagacttttcttgatttttttcaatttcattttgtaaattgtcggttaacttgctatagttgccatctgctgtccagcactgcgttttattaaatgcatcatccaaatttctaactgtatctactgtcatacttttttcgatttttcttagtgccgtcaattcggtcttaaaattagttccattagtctcattgtcagtaacttcttgctccattttttctttttgcacataccattgcgagtgttcaggagtatctaagaagttttccttgacaatttgacccaatttttcttgttccttttcgagtaacttatcggtactattagttagcgtcttagtagctgaaccaacatgcgtcaaaatttgtccttttaccccacttggtaactcattaaacttttgaccgttgcttgtccaattagctatataatcaactgtctcttgcttaacatcaattccataatgtgaacaataaagataacttgtaagctccgcttgcatctcttttaattctctaggcaagcccttttcttgtttttggctattatgtagctgtgcatgtcccaattcatgagcaagcactgatacattctccgttggagtgttgtatccatttaacacaatttcgttagtagccctgttaaagtatcccttagcattttgcggatccttatatttatcccgaatatctgcattaaatggggcataagtaatgactggcattttcatgtcactagctacacttcttaatccattctctaaggagtcaatctgtcctggattcttcatattaaaatcttggtgtctattagggtaaagttctgggtatttttcctttggcatattggtttgtggagcatcgaatacagtgccaatcttataaaaagttttttggtaagtttctatattacccgcctcaattttttgtttttcgtctttagtggcagtctttaagttagctaattctttgttgccatccttatttttacgatagaaaactgtagttttagtaggaacgaatattttaattcctttttcacccttgttgaccttatagcccatgcttttaaactttgcaaatgatcccaccgcagtcgcacctgggcgctgcatctgaatcatcattgcatttcttgaggaatagttatgaaacttatccataaaatcaagcatttctataactttctctggtgattgagtataattatctacttctttaagtagtccattttttaaatcctcaacggtttgagtatgtttctttttccaagctttacggtcaaaagtctttctaggtcgtctttcagactttaaagcatttttatccatatccattttatctttaacttgacctgatactaattctggttttgatttttgaaggcgatcaagatattgtgactgaagtgaaatatcatcattaagactcgatatctctttatcagttaatggtgctgcccaatcagaagtaaaactagatttattccaatctacatctgctaaagttccactttctttttcactatcaataactttttgagttagtggtttaataccatttcgattaatcgtgtgccattgataatttccttcagcgtttggtgaaaaaagataatgatactctacatctgaattaagatacttaccgtcattctttgatatatcattaatcatcgcagataagtcatgatagttttttctagcaggatcatcgattctttgtccattagaattatattcatccataagtttagtagcagctgtaggattttctggaatatggttatcgttatagttccctgtttcaattaactttttggcatcgtctaaagtacgataattatctagtaaattttgtcctgtgaaagtaagtccaccatccatatgaaaatactgagtagtaactgaaccatttggatttaaaattgatacatttgatcgtgttgacataatttttcctttctaagaaaacaaaaaagacgcttcataatgaagtgtcctgactacatacaagttatttagtttttactactatcaccttctttctagtaattttaaatttacacgtttctgctgaagataatttactgtcttagctgagaataaaaaacgctgaagttttgataattcaatgatttcagcgttttttataccatctatttaagccttggtgcgattctttaatgttacctatctaattcttgattttggtagaatgatttaattcttttagtttttaggtcattaatgtcaatatctttttgcgaaatttcgttgctcaaatgatacgcaacttcgttcttactaggtaaagtttctatcattcggtccaaagctttgtcttcttgttctctagtatctgcacgataaaatctcatgaggctaatcataaattcagcgtggtctatgttgtcaaaaggaagggttaaataatctctggtttcccaggtatctcgagcagagtttgcggcaattagcgctgttcttttatttccgtcctggaatggttgaagcttggataagcttgcaaatactctccacgcatctttagtagtctgtttagacgagttgtattgttcaattatttcatctaagtcttcggggtagacgttttctggagcaaagtatgcacctttagctgtgcctttagggtctgtgataatgacaattgcgtcgtctggattataacttgcatgtcttaagcgccctggaatacttgggtcttcttcttcgctatgggtaaaggctttattaatttcaataattccttgtcttgtaaatccgaatttctttgctgcagctatgccatctaaagcatcttttaagatggcaccatcgtggtgttgatgtacaagcttagataggtcattaagatctaaggctctttttgtttgcaacacagtactactgtagtcattcatactaccaaaagagactatgaagtttgcaaggtctaggttttcactcatttgttctcacttactttccgtttagttagattacttacaattttagcactatttaattaataatccttgttttttgagcggcacatacgcaagcggtatgtgcttcttttttacattaaattagcagttagtttttgattagctgctctttcttattatttatctttctaatctttgatctcttcttcgcataatatgatatccatgaggtatatatttaacctgcttattcaaagtttgttctaatctcttcactttttttctcctttacactacaataaatttaattgaagaagcaattttcaaattaaggttttgaattttcaattcaggtggctcgctgccttgtcgtatggcaaaagagagcgtagtgcattgcttttcaaaaagtccttcgatgtttggagggacttttcttttacactttttcttattgagtatgtgttaaaaaaagtttaagaatagcagtagaaattaaggatcattacttgatcatgttgcccactgccttgacgatatgctagtcagaatgtctattattcattaatttatcctttcatgttacaatgtaggtaaagatcacagtgcaaattaaagagttgtatttacaacttggctgcctactaccttagcgatatgctagcttaaagaaggcgaggaatagatcagtgagactcattaaagagcggcacatacggaaagcggtatgtgcttctttttttgcattaaattagcagctagtcactgactaactgctttttctatatgcttatctttctaatccttggtctcttctcaaataagccgatcgcttttcaaattcttgtcctggtaatgttctggttgtatgcttagatttttgttttccttgttgcattttccgaaaagcttttaaggtgtcattccaatctttacctaatttttcactaggtttacagtatttaactttaggaaatttagattgaatatctttaacaaatctttttccagcttcatcattatctacacctaaacctacacttttaagaattcgaccttctttttgtaattgtgctgctgtttgtgttatatacgagtcaaacacttcttttttaaggccatccattgaaacaaacctagtatttttcattccaccctttacttttaccttagacaagtcaaagaaactaattgcatcaattggtgattcaaagaatctaatattttctggagtttttccactcatacctggcgaatcaaacgaaaaaccatatcccttagtagaatttttctctatcattttgagagttcctcttctaccatatttttgataattaattctggtcccttgttttgatatacccttaaccttttgtctgtctttaggatcaagccacaaaaaaagtgcattgccaaatttatcttgtgcaagcaccttatctttatgtaattgatctattgtctgactcgaaattccacgctgattatgtaaatatccccaaacacgattgattttgttttcggagtctaattgatttttatcaaacttgaaaggttcttttttaatttgataaactttgccatcacctactccactagttaacaccttatccattgcctttaggaatttctctttttcatttaaattgctaccagacaattcatataatgtagaaaaacttaatgcaccctttccatgaacctgtcttgaattccagtaaaacgaattcttagatggtgtaatcaccaatgaatcatgttccactcctttaaattcatcactacccgtttgtcgtaaagcaattcctgcacttcttgcatattcaacaatacttgcagaatttgctgctttaatttgttcttttgtaaaagcaagcatttcaatttctcctatcttcaacaataaaaaacaagtagtacaaactacttgctaattccccatctatgcccgactaatatttttagccaataattaagatgatcttattctaattcttgctcaacttcattttgtaatttttcaaactcacgtaaattctttttagtttctttatctgcatttattttttcgaatactttttcttgatttgattttatttttcggatttggctttgactaataaaaggcttttttaaataattatgtcttttgaaagactttttagactttgcacgcaaatgtggtctatatgaatcatctaattttgatttttgctctgccgcatccttccgaatttcttttaatgcagattgaatgtagtcatttggatcaactttatctttaaaactgatcctatgtctttgattgtggtttgcttccttatcgatttttcttaagtcagcaagcaacgcattaccatttcttgcataaataccttctttgccatacagttggttaattgcataatttttattttcacgtttacttttaccatataaagcttgtcggtcatcttgcattttccaaactaaatctttatatctttgaaagtcggaattatcctttaacaattcatcaaccaaatgatccgacattttttgttggcgtttatctaatttgttataaaaccattctcttcttgactcaggcaaagctctaacaaattgatttatttctgtttgaaaagttggctgttcaacttgactagtcaaattaatttgaattgcttctctaattgcttggcgtttttgagatagttccttagtcatttcagaagaaccaatcagttcatttgcaaaaccacttttcatatgatcaattattttttgtggtcgcctacccttaggttgactaatcccttcacggtttataatttttcttcttgggtctttctcaactgttgcaatgtgaatatgaacattatcagtatttctatgaatggaagccacccagtacatctcatttaatggtggatccatttccttttgaaaaatactctgcatttttttagttgccttttgtagttcttcctcatttaatattccagttgtactagataaaatccccttcttttttaaaaaactattatcaaaactaacaacatcttgccacaagacagaattattctcttgtccttcatttaattgctcacgaatataatctaaatctttcaactgaacaatatctttgtcagagctaaatactccatctaaaactttttctttggttggatgaatttcactcagcttacttgcagcttgccctattctttccaattcagtttgttctttggtatttagtcccgtttcgttctttttctgatttaatgcatcaattcgtaccatatacccaagatacttatcaaattccttatcattcaaatcaaaaaaatttctcttttccattaacttttcagcagctgcttctcgttcagaatgttcttcactttttactctagtaaagttgttttcctgatttaattttcttacttgttttttaactcgacttaattcatctttttcttctgcagttaaaaattctttttcttctaatgcttcttttctggctatatatccaacgtaacgtccaaaagcttttcgtgaactcggcacagaaaattttgaagttaaaattatagctggtcgtcccaaaaattacctcctacaaataaaaattctatgaagcaagttgattaattattttgctctttcaattttaaaagccgtagaatcgcaatctcagcatcaaaatttactcaagttgtccgccattttcctccattctattattaattctttcttttacttttctctttgcagatttataaatatccgcatcaattccatttccaacaatttgcattccttgagtcatcaaaaactcgcttatcatttctgttagaattgcaacttgttctttggtaaatcgctgttgttttctaatgtcgcttaaatcttttgtccacttagaatttttttcatcattttctgctaacttcataaaatgatgaattacttcagcattattttttaaatcgtgttcctctttataatcttgaatccaatctaaatctgtatcagaaattgtcgctctaaaagttgtcttaatcattttttctggtcctcttaatcagcgtaagtttcttgtctttttttcaaagcattatcaatcttttgattaattttttgtaactcttccagttctttttctttttgaacacctaacatggcattgaagaataagaacttataaagttgaccattattatcaaagcaatgttcttttctaatctgcctaatttctttccattgcttatcgttgagtcgaaattgcaaaaagtgctgtcgtcccatttcttgccctctttctaaatttaatcatcttcttttgccgtgtcttctgacaaactatctaacaaatttaatgctcgttcggtgtcattaacatctccactaatgaaatactttgcaagaacattcagccctaataaattttcctgcagaagtttattctgcttctgaatcaataaactagtttgcgaatcttcattttgattttgaaaattaattggaatttgttcaatttgttctctcaaaaattgatttctggaaattttcttacttgaattttgatttaattgattaacaatccgatcaattctagccaagttttgttcgctgattccacggattaaaacttttaccataatttttctttcctctgatttctagtttctagttttccttctagtttctactctgaaatttgactaaaatctgcttcttttagttatctctagtaaagagcataagggaaatctgaccccacgccttttatcaaggtgtgctgggcttggttgtaccaagcgatttcgcatttttagaagtgatatcacttctgattaatttgacgtctgtatacttctaaattgttcgtcttttacctgacattacgtcttgatacgtaatgttttttagtgatatccgaacaggacgtattcttacgtagctcattacgtccaagacgtaacattttttagctaaattttgcacctaattatcaaaatcaccgtccttaatgtctctgattgtgtcttcatatttagaaattgcttgctgactttgtgtgatagctgctttgttttctgaaatatcattttccaaactactaatttgtgtttggtaattttctttttgactatcaccaactttttctaactttgcctttgcagaatctaaattattttgagaattttgaatcgtagcttgagcatccttaattgtattttgttcttgactaatcttctttttattccaattaatcagatattgacgataatcaaggatatagttttgatagctcttagttactttgcttgaagtcagatcaaccttattctctttaatgaagaactcaatataattattttcagagaaatcttgcatgttaactcgcttattaactttttgtggtagaatatcaatctttaaatctccaaagccatttttgattccgctaacctcaattactaaaaagtgattattgattttctgtgatttgatcgcaagctcttctccatcttctccgccacgtgacatgtttactactcttatagcatactttaagttgcttaagtctgaatcgtcactagtagatgttacgtctgtagagtccccaagataatactctagcaacatcttttcgctttgcttattgtaaatagaatttgctaggtaaaatgatgaattgcctgtcactacattaacagtttgctcagtgtcaattgattttcctgtccaatagggactagcaacgattgcaataaaaattgcagccaccactccaatgaatgataaataaattttgcgatacttatgtttttggtgtcgcttcaattcatttttgtttttgctttgaatcattttttgcctttctaattgtcatccgaatgtacacgatagtttttgctatcatttaattcctgttttaattcagtaatctgctcctgttgatctcgaatttgtctttgactttctgaatctggattatcacgattaaagtaaactgttgccattagttgtgctgctgataacaaaaacaaaactaaggcaactaatttcaaacgatgatttgatttttttagtttagttttttctgattgatatacaattcgactagacatttttaatcacctcttatgacctgatctatcttttctatgttagttcccgtatatttttctacttgttttccatactttaaatggataaaagttggtaccttagttaacttatactccgtaatatagtgtcggttttgtggttgattagtatttacaaactgtatattctttctaaataaatcttttttcattacagcgtatgaaaaaatagaacgacagcttttgcagtcatctcgataaaataaaactgttgagtcatcattagttttgattttaacgatgtttttttgatttagttcatgattaacatgttgattaaaaccaataactcctatgaacaacaaaaaaatcattgcacaactaactgcaatgatttttaccttagtttcttttttcggttgcatcttaatctgcctcacgatcaatttgatagcgaccaaagtatttaattgaagtaatttggttagtctctgtgtcatacatcagctgataggcatcagttggtgtacccagagttctatcgtctttcgtcatttcaaaatacaccttggcatacacgggaacttgattattctctaaaactcctgctttcaaatctagctcatcaatctgacctgtcatatctacaccgctatattgaagttccaattgcctatcatttttaaaaatagaatttgtttttaaaactttttcgcttactaaccgtgtatcttttaccttatctggtatttttaatttttcatcaccactatcatacgtataaagcattttaagcaacttacttacctgtttcttggcttttgtctgtgctacatcctgctcagctagtttctctttgctgcctccttccttcatagcaatatgcttttgcgaatttccaattttagcatctacattttttaactcatcttgctttttagccaactcagttcttgcctgatcaacatgatagtcgatagctttttgcttgttagtctcataattgattacgcctaattcgagcatgattccgaggattgctccacctaaaagatattttttattcatcttagttcctctctatgttgatttctttaaagctatttattctttgggtcttaagattataatcaaagtcccaaccataagtaacttcttttttattggcactttcgactagggttactactgtaatcttagtatgacttacatctgttaagtcaccaaagtaaaccgttgtactcttgtttcttaaataaccataagaatctccattatttttgatgaagtttttgccctctttacctggaaaaatttttgtccaagcactaaattcttctttttgtttagctgacgaaaattttcttttagtatagatagctggtatcacttttagaaacttgtcacgtgcctcttcttctgcactcaccacatcaaacttttgtttatatgcagaattctttgtttgactattttgctcttgaactatttgcttctcaacagttttaatttctgccctaatatcattcagttcatcatttttaggaactctggcaattgcaaacattcccagaacagcgaataatactccagctgtcatcatccatactttcagattggactctcgctcctttttctgctgcttcatctttatccttctttcttggcattaataccaggtatgtttcatccagaatttttgtgcattacgccatgaaccatatctgccttttacatatttatttgctacccttgtttgattcttatgactgtaatcaccattaagatattctctctttaattgataacgtccataaacacttgggttagctgggttaactgcgtcccatctacctccagattctctctgaacaatccagtcacgtgcttcagattcagtttttgataagccatcatcttcttcagattctgcatcattgttcaaaccatctttaattaatttaattgggtctttccaagtaccatcatctttgtacgcagagagctctgcggtagcaaaatctttttcagttgcaccaatgtgaacgtgagtaataccatgtgcattacttgctaagtgacctattttatctcctactgaaactttgtcgcctacctctaccttgacgtatttcaaatctgcttcatcaaagccgaattcctgataaatgacattccaaccgtcggagccttctacccaaacgtacattcctagaccatcttgagtatgtccttgaaatgcaattttcttaacggttccaccatgaattgccaaaatatcttgtccaccatatggaacagtaccaaagtcaacaccatcatgaaagccacctgttcttgtagatgacttaccaaataattgctcacctgagattgtattacctggtccttttttaggaattgacttgaatggccacccccatttgccgcttattggcttacaatcttcctcagctgaattatctgagccactagacccatcacctttagctagtgatttattgcctttcaaggcatcatattttttagcttgagcttccatacctgcttggtaatcactttcagctgcggtatagtatcctgcttttttcattgcatgagcatattgagcaactgtagcatcttttcctaatccagcttttttaaaaccattctgaaccgtcacagcccactcggtcgcaaaatcacttaagttcttgtagtgaacgtaattaccaccttcactaccacggctttcacctttggtaccgatagtgcttccttctgaataagtcataccaccaaagttatgatcatgtttagcaactgaactatcaccattacctgtttcctgtcccatttgagcaaaaagtaatctagcactaatcccagttttctcatgcacagcatccgctatatgcatcatagcggtctgtccatacttaggtgattcaatgacactaattcgtccttctactactcctccttgttctcctcctgtatcacattcatcatctgtagcagctcccattgctgcaattaaaattacaataaaatatataactgataaaacagctaaaattcctaataaaaaagcggctaatccagcccatctttttgtctgtcttaaccgcttaatacctgttatcattattgaccacctgcaaaaatttcaagttgtcgttcagatggtttcatcttgacttgatatctttctcttcctcccatcgtgacaattgcttgtcctgtttgcaagtcaggaatgttactgtaatctgaactatttaatgcttcgcctaatagacttttgattttcttaagttgagatggatccatactcattagccatttgtattggcaaagttcaaaaaccacttttaaacttgatagttgagcagattctactgaatcaggaaccatttcttcgggtgattgtgtcgcaaatataatacctgcattaaactttctcatttctcgttcgaagtttttaacataatcaaccgcaaaaatattttcataatttatgatgttatgacattcatccaggaacacatcaaaatactgtacatcttgacgtgtgattttccctgcctttaacagagcattctgttttctaccatttatcaatgcatgactccaaattaaacttagagccatatacaattgtgcctgataaacattttgattcattgttgaaatagcagaagaatcaaatagtagaagcttagtatctgtcaaatctctcattgtagaataaccatcaaataattgaccgtaattctcaatcattgattccaatgctaccttgattttttcataagttcttattctttcagcagtaaattgatgttgttgatagtacattggcgtagccaatttttttagccaatttaaaaactgactaaaagtcgggtatttttcactatctaaattagtaatttttatatttcctttattttgttgaaaatttctaggtaataatcccatgtctacataaaatccacgtaacaatgaatcaaattcttgcatttcaatatttacaaaggatcccttattaatcatttggaatagaatatctaccttagaaatatgttggtaaaaacttgctagctcatcaaccttacctgtattttcatctacagtagttgccattacttcaagtggattaatcataccttctgatccatccaagctaaccacggttccaccataatgcttaattaaaggaatatattccttagtcttatcaattccacgaaagtacatatttctagcaattgtaccttcaaccaacatcttcattaaagttgatttaccagcacccatcttacccaagatcatcatattaaacgatcttctgatattagttgatctaaattgatcaaaataaaaggctcccccagttgaagtacgacctaaccagactcctctagggtcctttaagctttgagctgaaaatgggtcaccagctccaaccgttaaggctggaattggttgttctggcaatgctgctaaatccttttcttgctctgtgattggtaatgccattgatttaaactgtttatcttgcataaacatataaacagcaacgttataaccctcgcctcgaagcttgccacgaagattagaaactgattgatctaatgcttcaatcgttggagcatatacaaagattctggttagcattaatttgggaatttcgccaccttgacttaattccaatgcatatttttccaatgattgcatatctttttgtgcatttaaagcatcagtggcttttctagcattaacttgccggtcagctaattcttcaattgatctattcaattgccgcttaatttcatagcccgaatcagttttaacgtcaattgtagttaatgttgaatcgtttaatgacacttgagtaagccagagcaaaagcggatcattaggataatggattacagataaacaagcagcatatccatcacttgcaattgcataattatctgcaaaagtaataccgccctgcggttgtacttctgctagaaacttagtattgtaaccattttttagtaattctctttgctttttcaagctggtaacttgtcttggatttagctttacagttacctttttcttcttgtgtctctttgttttcaataaactagaaattctcattttttctcccttacttactattcaagttgttttctctaaagagtactttaaccgtttcttcatagtccaatggtctcaagcccattaacccttgatcagcaaactgagctgttctggtattaaccctaatatcatgtaaatcctctccaaaaatcatgatataaaattgcacgtcagaatagtcttctgtatttcttgatagcattactgcttgtaacaacatctcattaactaatcttagtcgcatcttttcatatctcgttcttggcgaacgaataccattttttaagtgacgaaaatactgctgctgttcactagtatcaattcttgtagacataactacaattttatagtcattactataaactcgattaaatgcagtaaatgagtctagaaatttacttctagtttcatcatcaagcgagtacaagtctgtcgaatgtacacgcaaatagcgtgcttgggtgccatctactaaatcaagtatcccgtcttttgagcagttactatagcccaagtattcaactattgattgatctcttgcatcttgtcttgatcctttatctaagccaaaagctctaaacaagctaggagctttgctcctactgtttctactttttctttttgttcgcattattttctccttctaaaaataatggataatatctgctttggtcttgtcgcataatgcttaacaaaacacgataatttctaatctttggcgctagaggggttcgcattactagcagaattcctactacaactccaaaacctgtcattactaattgccaagtcggttgtaaattaaatagaaaagaaatttgttgtcctgccatacccccaatgaaaagagcaaaaacatcaaacatatctaggaaaaagatttggatagatacattagttgacttaggaatcattattttttgatatttatccatgcactaatcctttcttctgctatctccatgacctaatttgccaacgttggtagaacttggtgatttagtctcagtagagttttcaacttgctgattgattgtggtcttatcatgcttaatttcagtcaccgtgttggtattgccttgagtttcaacggttctattagtgtttgaaggtacgctgctcttcatagcatccttcacactactcattccttgattgcctacatcatgagtagatacttcagttctgccagcctttctttcaatatctacatggttggtaccagcagtttcagttactttactatgactgtcttgtcccttaaagtctgaaacattgcttaagtgtctaccgccttcaccaactggttttggcggtgtggtttgttgatttgaacggtgttgacttgctaacttactagtggatttttgagtatctctcaagcttggtaattcatcgaccgcattactacttgttggtgagcttgaagagctatttgcttcaccacgctttgaacctgaaccagtaactgaagcactgttagttctaggatcatttgctgtttcttttttaccagtctttgaaccattcgttgcttcaccaactgtggtatttggaatttttgcatcattaccagttgtcttagctccacctgttgacttaatagagccgtcagttgaactttccttagcagcatttgatttaggcttgctatcatcggtcttaatgccttggttttgaatattatcaggtttaactgatgtattcttaccttggtcatttacatttttagctgaatcaacattgcttgttgccactgtttctttcttgccatcatagtttggatttcctacaaatgaagtatcacgtccaatacctgttggttctgcactgccaccattcttttcagctctgttttgcatgtatggattatgatgtaaagtgttgtactgattatcagttaaaccaccatttctcatcattctagcggcttcatcttgtacagtttcagatacagcaccagaatttactgccctgttccaatcaactgcactgccaccattctgcttaaagtcgttatgagctgaacgaaaggctcttcttgcataactgccagcttgttttgcttcactattgcttgctccattttctttagcaatagccttagtagagctaccagcttgccaagcttgagcttcaccaatcgctgcccctgctaacttaccagaacctctggcaactccaacagcgccttcagctaaatttttacctttaccagcaatatattcagttgctgcaattcctccagcaactttactccagccttgcttaagtccagtatccaaaccaaagaatttttgaaccttgcttgaaccttcccaaagtgcccaagttaaagcaatcattccaactgcatatagataaggattatcatgaatctttcctgcatctgatgaactcatccacacagctacaattctatagaacgctaattcaaagccttggaatgcaattaacaacgctgaactaaaaatatcttgtaccgcagctttagtacgctttccagtttccaaatcagtggagaaaataatgattgataatacttgcataattgccaattccaagaatgctcttactgaaacaaagcaaactagtaagaaggcaactgtcattgaaaataaggcaactacaactgggaagaattgtactgaatatcgttcatacccaccgttaaaaattttgaaaaaggcagtattgctttgacttactttggttgcataatatcctgaatatgcttttccctttacatttgatttcgtaccaacgcctgtaggagctaatttataacgcaaattgtcagggtcccatgctggtttttccttagacttatttgctttattacttaatttctcagctaaatcagctgaaatagtagttgataaatcgcctgatgttgcagtatcaaaatcagacttgttcatagcaaatgaaccatagtgaacatctttttgtctctggtctttaatttcaccatttttatctttagaaacaccttcccatttggtattagtatccccattattgattttgaagccactaaaattattagctatgattgctaataggtcattagaattggcttgtactacctgatatggcaagcttgacgtccctttatcattatcagcctgtacaaagcctttatatacacctgtagactgatcaaccacccaatttgtaattggctgaatatttccgattaagaacgctgaaattgctaattgccaaacgacattttttaattgaggagctttacttgaggtaccaattttaattccgacccaagttaaggttaaaatcatcaaccctgcagcaattcccattaccccattaattaaattagtgtttaaacctgtggattttaagattcctgagaaatccaaactatctgttgctagttcacttgcccaattggcaaatccataaaagatcttaactataccccattttgtctgattcaaaatacgtcccaaaaaatcatcataatgtaaataaggtgccgcattttgtagagcttcagttactttttgtaatttggctggatcataatcacctgaattggttgatttttgccaccaatctaccaaactactaaaaatatcaagatactcaggattaatgaaactagttaaatagaataaccaatttgtcattaatttttcctttctttaaacaaaaagataagtagtcattatcgctacttatcttgataatattcattaaagctttggctaaattcctgtgttaactcattcttttccttgttcttatcttctaattttttatctttatagatgatattaacaaaagctattgaacttggtttttgtccttcaggcacatcttttaattttgtagcctcgttcaatattgcttgttttgttccatcactaatatcaccatcatgttccgttaaccagttcgtgataaatggtggaatctgattttcttcttcctttaaagacttcttcatttcttgttcttccttagcatctttagcagctgcttgaacatttgcgtcactttgacgatattggttatatgcctgcaaagccaaattttcttcttctacaaatacatttccatcttcatcttgtttggtaacttgttcagtccaagttaaccatttgctccaatcgatttctaatgcttttaaattaatattggcatgtgcatcaatcttttcaactaaatctggattagttttaggattaaagtcatcagttaagaatgtatgtgcaaacggcattaatgtttttcctgtgttaaaaataggatgtgaaactaccgcccagccccatttattcattcttgttaaaggtctcaaaactagtctttcaccgccagctaaatgttctaatcgttctggtagtatcaacggcactttatctacgctaacactaacatttttggctaaaccattttgatctttagaaatattgcttgtctcaatcgttttattgccacaagcttctgaaaattctttgttagtagctgaatcagtagacataatcaaacatttattctgacaattttctttaataacttgtccgtcttctttgccatacttactgtagagctgggcataagactggataactaaagtaaatagaatattacgacctgctgaaactgtcataatccgatccatattctgcagcggaatcatactaccaaactcatcaaaaatacattgtactcgtctaattgtacttccaccttgaaccagccgacactgacgtgataattctgtatataattgattaacaaaaattgtagctagcaagttgtttgaagcatctgaatctggaattttcataaagactgcaattggcttatcactataatgcatcttaaagttttccatcttaatttcaggttttcctacctgacttacttcaacctttttaactttaggattaatctttaacttaaaagtattcttcaaacgcttatgtcctgcaatagcttcaatttcaacaaagcttcctgtttttagattgacatcaaagttgttttcaacaaatcctttttgactaacacgaatctcattcgttttcagttttttattatgattatctctaaaattgattttaattaactcaccatatagtcgttgatcaagcaactgaaactccaaatattttggaaaaccaattgatttcatttctagtgtgttcatactggtcatgcgtgagtttttcggtaaagtgaaaatatctagtttctgtacaacagttgaaaaaattgagcctcttgccttatcatctgagaaatttgtggaaccgaattcttttttagcaatagatccctgttccaaatgcttaaagtattcacttaaaacgttgtgttgagtatatggatctgatggattagtataatctatctgtcctaactgattaactaaatcagcgatatttacaaaagtaatatattctggatgggcttttttatctctaaagtttttaggattcatgcaatactcaatcaaagcaataatcataccattaacagctgattgtgcgccgtcattaacccacttgttttgacctgcttgtttatcaaaataaagcgagtaggtaattgagttaactaattgcattgctccttcaacatcaccctgctcccagcttctaatgattaactgtagcggattaaatgcgattcctttgtttgggtcatctaaatttaattcataaacatcatagccacgcttcctcaacgtatttacagaagcaacatacagttctcctttaggatcattcacgactagtgacgattgtttttcagccctacttactaggtcgatttgttctaatatagtagtttcacctttaccagaccgtgaagtaccaacaatcaaattatgaactgtacttgtatcaatgaaataatagccatgtttagtaataaatggaaatttttgggttaatcctaatctattaatgtgagcaatgggaaacccaccaaaacctttaaagctaggctttttaggatctaaccctggttgactatgatcaggcacttttacataggtgtcttctaattccttaactgtagtaaaacgggcatttcccttttgcccatgagcgactttttgactttcaaagtgaaatttttgacttaacaatccaccaataattacgctagcagcaaatacctctaaaatttccatgggcttcaactgtgtcttaaagaaattcaagccagctaatcccgctttatctaaatcgagaccattcgtgaataagttatagtttttacttttagtttgtaacatgacattatggaatgctcctaataaccacattattactagaaagataaaaattcctataaccaacgttgttatcagcttcgtataattaaaattaatattgctagactgcttgttttcatttttgggacgatgtaattgtctttcaacttgatacaagcccttttttacaagattcttttccttgtttctagcattttttagatttattcgtgatcttctttttttagtacgcatatctagctaaccacccatcttgccaatcagcaatatcatagaaagccaatgcgacagcttttttagctgagttggaaatttctgttcgctgatcatcagttaaacttagccaaatatcccttgtctgagctttgtcttcattagcaatggcactgtacaaactagcaattggatttgaatatattgtagcaatcttctttaaatttcttgcatcaccttgccctaataaaccatctagcatatctctcttttgtgcccaagtcttagtttcacgatattgttttaaaacagcttgtgacctagttaaatgggttggagtagatttagtctttgatttagcattagttttttgatttttagcaatatcttttttagcagattgcttactacttgattgcttgtttttcttgacatgcgagtttgaacttgatcgttcaattgaagctttttgttcattattagaatggttattagtataagcccatgtaccacccaaagccgcagctgcaaggcaaactaatgagataatttcagatttatagtgatgtttcttagaactgttatcctcggtttctggctttaactctgaatcttcttcatttgattcagaatcaattggtgcatcatttttcttagtatcatctaagtctactacttcaccatcaacatgtggcacaggcactaaagcattctttccatcattatttaaagtaatttttacgttaggattttctaaattattttgagtaattgctgcagcaattgctttcgcaaattcctcaggcaactttgccatattttcttgttgcaattttgccaaagactcattctgctcaattgctttttgctttaaatcaagttcacgttctttgcgagcagcttctgcttctcgctgacgcttttcttcagccttttcttgatcaagtagcttttgttgatttatttgttctttagctaatcgaactttttcttgaaccttctttaaattgtcttcaaataaatcattattcttgtcatagttatttctaactgcatgatcaaaatcattactaatggttgttctactatcatctaactcagaatttcgtttttgtacttcttcatcacgcgcaacacgttctactttagctttatcagcctttaattgttcatcaatttgttcattagcattacgagttttaagttcttcttgatcattaaaattttttagagctaaatttcgtttctcttctaattgtttcttatactcagctaatgctgcttcatcattagtttttagttctaatgccttattttcttttaacttgctcaagtcagactgattattttgcttctgttgagttgctttaactactaactgttgaatctgtgcctctgttctgccttcaacaattttatctagtgactctttagtaactctgttatatgcttcctttaatctatctacaattgcagcctttgatttcgctaaaccttcatcatatacacgttgaatatcctgcattgaataatctcttaacgcctgattgattttatcattcaactcttgttcatattgatctttagggttatctaaatatcctagatcatggcggatattatctaaagcaaattgatttttatcatatcctcttggtaaacgatcaagaatatcgttggcatccgtgtatttaccataactaattacttcactacgattagtttctgtttcagttgtttgacctgcttgaattggtaaagcatcaacctcttcaggtaattgtgtaggaacattattcaaactaggattggttgcggcattactatttgattcttctgttggactgttatcctcagtctcatcatttacatcattttcaggaggtatttcatcacgcacttcatcatctgaatctagaatttgattattattaaacatgaacccattgtctttatttaaatcctcttcatcatcactcaaactaggttcaagttcattaaagatttgatcctttagtgttgttactgtttcttcttgatcacgagttaaattttcattctctaaatcacgatcaatcaagtttaaaatacccccgtcttgatcctcaggtaaaatttgtgcttcaaagctgctctcttcacgatcctcatcttcatcatcaaagatagtaaatgtaacattagaatcagcttcttctaagctctttgcatagtctttaactgcatcatctgcagttttaatgtctaactcaggcgatttcctacttaatttatgcttaaattgaaaatattttttcgccccttttggtaccttatcaaaggtaactaatagcataatcttctctccttcttcaacgcccaccatcaacccagtaagtcttacttacttcaccttacttataaattaactatctagcattccaaccaaacatatttgcgaatgatggtactaaacttgcagctaaagcaacaatggcaacacctaccagtgcatacatcaataattgctttgcattttgcgacattctgttaccaaaagcaaaaagaataccagccaagataataacgacaatgaacagacctttggcgatattcttcaggttcttttcggtactaccagtagccttattaatatttctccaaacatcaagtaaaactggatgttcgtttaaaaaagcctgggtaccgattaagccgctccaaaataagtaggtcaatttggtataaacagctaaaaacattgttaatcctccttgtataaaaaaaagcatttagttagctaaactaaatacttttacttgtcccattaaaatcacttgtaagcttattatcatcttttgatgacgtaaccttatcatttaaagtcttatcaggttcagcaatctgcaatttttctaactgttctgataattcttttttacctgcgacttctaaaactgcatctttatatgcgcttttagtgcctgagatcaaatcttgcacaaactcaaccataattttttcttcccaagccttttgtgttaagccttgggaattatgtagcttgcgtaaaatggacttgtcttgtttgctaagaaccatttttcctccttaactattgcccaccatctcacccgaaagaaaaagaaggattagactttctcaccatttcatctaatcctttatacgttattcgtctttgttacctggtaatgtttcagtttcacgcttgttgtctttatcagtgtttttattcttgtccccatctcctgttgggtcaacatcttcactggtatagtcgcctgaaacctcgatcttcttatctgcagaagcctttggtgtctttggcgatacgtgagtaatattacttggaatatcttccttgttgaacaagaagtgtgcttgatttggtacttcaatttgtccattatccttgttcaggtagtcaagcaatttaggagtattgattaaagtagtatcaatgaacatcttcaagtgcttaccatgccatttaccaggctcggttgctacccacgaaatcttaccagtcttattattaacgtctaatttaccttgatcagtaatttcttttgctttaccagcactatctttgtcgtcatagtcataaaccttaacgctcttaatgttttgaacgtctgcttcgatagcatccttaattgcaagagaatcaacattcacattatctggtacagtagcttctacgcggtaggtatatttcttgccaaagtctacatctctaagtgacttagaatcggctaatccatcttctgaaacaaacttttcatcctttggattagtaaatggaatattagtagttacttgattagaatctgcactaccattatcttgaattactttggcttcattgtaaattacagcttgatctttatgttttggatctgcgtgatcctttaagctctcaccacgctttacagttgcatcaaaggtaatcttgtaagtttcattgtagaagtcatccattgccaaagcatcagattttgcaattactgataagttattacctgaggataaggttactgtgaaattgtaagtaacatcttgatttgcacggttataaactctaattgagcctgtatcaatattcagaatattatctaaattatcagtgattctatattctgtatattttaaacgcttttcaacatctggtacagaatgtgtaatttgatagtgatattgttcatagcggttatcaagcatatcatgagttactgatttaattccaccgacttcactaggtgtatcagttccttcatccttgtcagaaacatatttattaggattcattggtttatcttttacaattggcatatcaaacaatcttaggtaagcatggttaaaagtaccattccagatactatttgaaatagaaaccttatccttatcagtcattccagcatcaggatcatatttaccttggttcaattgccaattatcagtatctgcttcaatttctgtttggttttcagctgcatgttttcctgttgtagtaccaaaaacccaatacatattaatatggtctgtgtttgacattgttgctgtatatgcagccttccaatctgaggatcttacagtacctgaaccatcaggtaaagcggtatggtgttgattggcatctgaaaagatgtaattattgcctaaagtatttttataacttaaccaagtattaccatccttttgtccatcgccccaaataacttggtcaatcttaccataagttgatgtatcatagcctacccattggttaccatcaatatcacgtacactttgatttaagttcaacttcaaaggtttacctgtatcatgatcaataaaatcaattctataagcaaccgcaccttgtccaggtgtgaaaacttcaaaatatggacttacaccaaaggcaattgttggattctttaatggaactttttcacgtttaccatcagatgtatcctgccatttgtaggattgaatattccaatctgttgcggtgattttgacatcaatagtttttccgctgttaggatcaacaccagtgtttgaataataaacaccaattttcccagctaatttttcatttcccataacagagaatgcataccaagagtgatgtttgtcttcagtattagtacttgaagtagcccaatcttgtgacgcaccaccaaaggcatggattttagttacaccctgaataatcttgggaataaaggcatatgaacctgccatttttgttccaactgcgttttgtcctttcggcaaatttaccatttctgcattatccgcatgtacaatgcctgatctagtagcaagaaatgtgcccagactaaagccagtagccattagtgcaattgcggctaagctgactactttgtttttcttcgttagagaaatcatataatttcctttcttttgagtaacaaaaaaagaagagccgtttttatttgtactcttctttatacttaattattaaattagattatttagttagcattattccaagcactaacccattctgggcttgtaccatctgcagtaaagaatgaaattcctacactactaccttctccatcccaataataatgcatgcttaatgctgcatatgcattatgctttttccaaccatataaaactcttggctcgattccttcactatttttcatcatatcaaataatttatcagcgacttgaactggtttccaacctttatgagtaaaatctccaccaattacaaagcctttatgattcaaaccataaatagttgaatctacatagccaacagcttgatccatacctaactttgttaagcctggaagatatgctcttatttcattaatattttggctaattgtatcagaaaatctactaaattctctagtaccaggtatttgtgcttgttgtgctaaattagtcaattctgaactagtcttgaatgctggataacctttagatacacggtaattttgaatatcttgccataaacgatcttcaatttgttgaacctccgtatcagtaaagtatacatatacattcattttctttctagctaatttttctgattctgcagtcattggaccatctacaagtgaactcttcttagtgttatatcttacaccagaatcatcactattagtatttataccagatgacttagatgaagaactagatttcgaagtagtagatgatgtacttgtttttgcatgtacactattacttgttggaaattctcccttagtactggattttgtaaatccattattagtagtgctcgatgacccagtattataacttgaagttgaacttgtattagtagaagcaaactttactacgaaattagcagtacgaacatatttgttcttgccaatcttgtaatatttcttgcccttaatcgttttcctaccaaggatttttacaagtttgcctttctttaatactttcttaccaacacgtttaccctttgcattataaatataagcattctttgtcaacttctttttataggttgctgcttgtacaacggttggggtattttcaacattattattcactaatgccacagagctaacagataaaacagctgctgcacttaagctaaccaataatcttttcttcatttctagtatcctccaatatataatacgtggaaaatttattttcttttttctacctacattatataccgtttttatgacaaaagcagcagctaattacttagtaattttagtaattaaccctttaatcttattcttaaattcatcattagtcttatacaaataagtaccaattccaccagccattgcaactaaacttgcaataatccagcctgcatgttgcaagataaagtgacctgttcttggcaagaatccatttttacctgtaatagggttatttgatcctggattgtttgttcctggattatttggattattaggattctctgtgctattcgtaggattcttaggattgttgacgttgcttggtgacttcttatctgcttgtggtggaatgacattaactgtattagacttaacgtctttgccatttactgtcatatcagcagtgtttggtacttcaccattaaccttagaatccttctttaacttagcagtgatgttagctgtaaatttcttaccgcccatcttgcctactaaatcagccttaggcttccatgagaacttttcagtattcttatcaagcgtaagttcaccttggctagttacgtcattaccatcagcatcagtaatggttaccttttcaagatcaaggacatcttctaagtcgtccgcaaattcaacagatttaacatcttgtttatcaccgacagtgtattcaaccttgtagtcaaagtctttgccttcttgaaccttatctgattcaccccattgacctgattcagccttaacttgcttatttaccaagtttccatatgggtctggggtcttaccatctggtttagaaggatcgttaggcttatccttcttaggatcttcagggttctttggatcaccattaagcgtagtatgaacaacattagttggaatatcttgaccgttaatttgcatatgacctgtattaggaataccgctattgtcatagcttgatacatctgcatttggtttaatgttagaagcaattgcaacatatagtttcttacgtgagaacttagctggatcattagcagtccaagtaaagctttcatcctcgtctgaagtaactaacttaccttcgttagttacattattaccatcactatcaatgatgacgacattctttaagtcaagcacattctccaaatcatcacttaatacaagtgatttcatattttgagaattaccaatatcaaacgtcaacagataatctacagcatcaccacgtgaagcctgattgctatctactgttgaagaattaataatttctttcaaatcttccttagaagttggagatttagtagtaacttcactagcgttctgcgatgaagacttaacaggattcttataaggcgtttgaagaatttttacagcttcttcatattgcttgtctgttaccttatcgtttgccttactccatacaccagtattagggtcaaccttaacgtattcctgtgccttttgatagtcctttggtaaagcaccatcagcatcagattgttgtcctgaagaagtttcagacttattgccaaagaattttgcccaatctgaaggattcttaacaattcctttatgtgtcttaggttcctctacctttggggtcacaactggagtattcgatggggtgtctttaccattcgccttaaagtgagccgtatttggaatttcgatggtattgtttttaatatacttttgtaaatctgcattgtctttgactttagcagtaacttcaactgtatatttcttgccaggcataaccttaaccaagtcagcatttggttgccagttaaagctttcattcttttcatcaagcttaagtgtaccttgttcagtggtaatatctttaccatcggcattcttaacaactaccttttcaaggtcaaggacatcttctaacttatcggtaaactcaacatcggttaaatgttgcccttcacctgcagtatagtcaatcttataagtatagtccttgccaacctcaacattgtctttatcttcatgataggaacctgatagtccctgaacactcttaactaccttattttcggctggaggtggagtttcaaccttaacaggatttgaaggaatatctttattgttgtacttcatatgagcaacattaggaatttcgtaattctttgttgctttattcaagtaaccacttaaatctgcatcggtcttcagcttgacagtaatatctgcagtgtagatatgctttggcatttgagttagatattctttagaaggttgccaagtaaaactttctttatctttatcaagttttaaatccccttctttagtaacttcatttcccttgtcatcggtgatcttaacgtcttcaagatcaagaaccttttccaaatcgtcatagaaaacaacattactaatgtctttaccattttcaggaattgaatattgaactcgataatggaattcatcaccagcgtcatgcttggctttttcaccatattgaccgttcttatcctctacttgcttaattgcagtaggttcttcatcattcggtgtatgaacataaacaggtggggtcttgatcttttcatcgttatagatcatttgaccaacattaggaatgttgtattgattcgtattcttatccaaatacctgtctaagttagcattcttttgtagcgtggtctcaattctcatgcttaactttttaccaacccaatcttgaggctttttagctgtcatattggtagtattcgtacctttatcaaaatcagctgtaaattgatcagtaacatcggtattaccatcaaaaacccgagttttattatgggtaaatacaggctctaatttgtcaaaaagcactaatttctttagatctacattgtatggaacttggtagtaaatatcaaaagcaatatctgatccctttttaaaagtagcatcactcacatatttcacatcagctgttgcatcagccttaacaatattagggtttgcattatgattagcgacagctacaccaacgccaacactacctagagtagttactacacctaatgcagagagtaattctctagtttgcttttttgatagctttttcaaggctattcctccttaatttaacaaaaaaaacacctgcatttttgtcaatgtcacaaatcaaaacattgattcatatgtaggtgttttctaataatatataattattggcaattacttgtcttttgataattgcttgattttgatagaaaatggtttatttgtaccatcttctaaccatgcataatcaagttgtgcattttcactatcagcgagatcattagctttttctgtatcatagtgtaattcaatattattgtcatacaactctcttaagcaagcataaccaagaattgccaagaaataattcttatccttagtcttatcttcaaagacatctggatacaaacgactcattctttccattgcatcaatatattcactttccaacattacggtttgaaaagcataaggtctatctaccgctgtataaggagtatatgctacatatggaaaacgtccatcatacttgctagccaatccttccgaatacttaaggaataaccagccagcccatagaatccgaactgaagccactcgattgtcttttctatctactagccatgcaggaaacctttctttaataattttatttgtatcagcaagcatagcttctggtaattcgaaatctacaaaaacttgttttgccataacattttcctttctaaaaattaaaggagcctctaacatacttagaagctcccttataatcttgtgaaccagtgtatttaccacgaataaaaagtctgccttgacctgtccagtcacaagtaaacaatgatatcactggttttttcttaaactctttattattccaagctaatcttaaattataaactgaaataaattgtgaagatgtgatcttgtaataataaactttcttataatctgttagtaagattgttgttccattaggtaaatttcctctgacctttgcagtatataatgggctaaagaacgaacgcccatcatccatattatgacctgctaaagcgtagtttccttcacccatcttttgatattggttcattgttcctgcacctaagttcagttccacattaccaactccacgatagatatttaatagaacattatgatctcttattgctatctgtcctacagctcgataatctcttctatgctgatatgcattggcaagagattgaggtgatacaggttggacagccttcatattaaaacttggctttttcttctgtttgttttttctttgactcgacaaatgattagttgctacatagttagcagcttttccttgaagatgattaaagtttgcaatacagtaaatcgcaaccccgattaaaattagtgcaacaatagctactattgtaccaatttttttctttttatcactttttcgctgttgattaatagctaatctacttttttttattttcatttttaggaacaaaaaaaggcaattagcataactaattaacctttatttctaatttctacttagcagcttcccaagccttaatccattctggtgaataacttcctacaacggtaaagtttaattccaaaccgtgatcgatataatctccctcattattgaatctaacttttaaagcagcataagcatatttatctttatgtccttcaagtgttctcaagtctatgttgtcttcttctcttgtataagcattaaagatttcatctgcgactttcttgggatctctttcttttagattaatgaagtgctgtttcacattattatatctgaaggcatctaaatcattaagacttctcgcactatccattcctaacgcctttaatttaggtaaaaatttagctaaggtatcagtattttgaaatgtaccaataccatcacctaaagcgttatattcaggagtacctttttgcataattcgatttacaaagttattcaactctggatttgtcttgtaggcaggataacctttactttggcgataagcattgattttttgccataaataattttgaatttgggatacttggtcatcagtaaagtagatataacctttttctttgatccattcttgttttttagattgagaatttgagctattatgcttattgtcgtttgcagtactattcttagaattattagtcttcttttctgctgttgcagaattgtcagtagtattacctactgcagtatctgtagcattattgtttacttggttattagcaccttcagccgaggttgattgtgcatttgcagctttcacatattgaccattgcctaaggacaagtaatccttgccattaattgtcttaacaccaactacagtaaagacatggttcttctttaaagtatcagtgcccttgattcttttgccttcagcgttataaacataagcattgtgggttaaataatattgaccgctagccgtattagctttactggtcttcttagcaaaattagcaaccttaacgtattgattcttaccaatgcggtagtatttcttaccataaatcttctttgtaccgagaatcttaactgttttgcccttcttcaatactttcttgccataacgattgccattactcttataaatataggcattatgagtaagcttgccattttttactgctgcttgtacaacatttgtattattagcaacaccatttatttcattaacacctactgctccaactgataacaatgttgcaacagataaacttactaatacattctttttcataaacataatttgctcctctttccttcaaataattcagcttaaattactcgctaacttttccccgctctcacctgctttcattatactacatacgcaacattatagcagcgggatatccgttaatttttattattttaaaatatactcttgcgtacatcttccaaaacgatcatatgtaaaagataacttcacttgatcattctttcgggaaagtaatgcacgtaatgctaatgtttctttttgccttaaaggtgtaaaatctttagggtattccctcgctaattgattgcgataacggacatactcatccgcagttattattgtaacattcatttttttcattacatcaatcaatcgatcaacgcaatcaaaattattcataatttttcatcttaatcccatttaaattgtgatctctttaattaccaacggttttgcgctatgaccgataacgatgatggttttctagttagccaccaaactgtaagcttttgtacagtacgtagcagatagcttcacctatctctagcctctcgcttcacgcattccgcaagctgtcctcttatcaatcctaatcaaagactctttcttgcccttcagttactacaacacttaaagagttaagtttatcgactcacttactattgttgatcacattccgacttcttatttactcttgagtttttcatcaaggtattcacatgtcaaaacagccaaaaagaatgtatgcttatcttttagtagcctattacagccattactattactttaaatttaaaatttcgttcaaactaagacttatcatcaagccaaaaataatagtaatctttgttgatggacggctattcccatcttgacgggtgtgattctttcttcttccacctttgtgtgccttcaattctctgtcttgcaaatcctattgagtcggctcaatagtcatgcacacgtcctacgcttgttacaaagcatagttgacgcttattctgttttcaatgtactaatggactgtttaccagccctaaaagaactagctgagttgaacagctaaattaaagatcaaagatcaataaccgtaccgactttcttaatgattaacattctaaggattttgcctcttttacttgatttgtcacgactactgccacaataattgctcctgtcacagctaacgcagttaaagcaaacttgctaaactttttcacgtttatcatctcctctgattttcgtttacccatttcttcaatgctgctttatcaatttttccttcttgatagcttctcaataatttcaaataattgcttctagcaacttctttttgtgtaattcgttgcagtagcttttcttgttgcttcttggctttcttaagccccctattaacggaaaaacttggtgggaagccctgatttcttgcgattgtttcattaacttctgttaactgttttcgcaaatcattaatttgactatcatacctaataaggagttctttaggattatcatccatatttttcttcaaatttttcatgtttgaatacgctcgccagacgtaataaacaatataaatacctactgcgactgttattaacttatacatatttttcctcactagattagagcggaaagattcgaactttcattgcaagtattaagtattgagtattaaagtattaaaaatagggatatatatgaatatcaactttttgattcaaaagaggagcaactcctttaaccaatattcattccaacttgcattttacctattaaattacgccctagttttacattaaatagctccagtaatatccgataaataaaatcatgatccatagaataattccaagaatcgatagcagaactgtcactaattcatccaatttttcaaaaaagttagcaaaccttgtgcctgctaaacttggcaaagatgatattgccataagaataattatgaataaatttcccgctccaaatgcgatcactatgtatcgaaaatgttctaatataaatgaactgatcataatatcttacttgctaacatcaattagcggctttttcctatgatgagattcaggatattttcttttacacaataacctgcgatgtcctaatttaggatttacttcaaatccaaagcctaaataaatttgatcataaatctcacttactcgataaaaagttgcttttttatatccagtattgtatttataagactttagagacaaaaaattttggggattttttataaataacccgtcaatattccagtaatggtacccatctatcgtcagaatttcataaacttctttttccactctgaatacgctaaagcgtctattttttactgatttttttgtcatccaatactcaccaatcgcattatctttattaaaatggtaaatcagcatctgttagttgtgcttctttctgacttccaaaaggttcttctgccaatttatcttttttgtttgcttccacaatggtgcggtcagcttctggctcttcatcatttgcttgatttgaattctgaggaatagcttttgtagactcttcattttgacttgttaaaacatcaaatgaattaacccagatatattcatatgcaaccttattaccatttttatcaataaagcttctagtcctttgttcaccagctagaataacttttaagcctttatgtactttagcaacgagattttcagccactttattccacgcaattacatggtgccattcaccaatatagtcttgttgaatcttgctataacggttttgacaaatagtaaaggctacatacttttttaaagattgggttgtctttaactccaattcttttccaatgtagccgtcaattacaacttgattaatcatttttttctcctcctcttttaaaatgtttcctgatatttatattatatatcgtttttacgatatttcaagtgaaaaacaaaaaatatacagatttgtagaagaagtaaagcaaaaaagacgctaacaaacttggacagtttgtagtgactttttagtaaattcatacttttcttcactagcttcatggataacatttaagagagcttcgcttttattttctcaaaatatttattttctatctggctaacataatttctcatatattcaaaatctaatattccattactcttaacaggtaatttgaattccgcattataaaaaatgctatcaacatttcttacagcttgtggatcaaatttcaatgccagtctttgcagccatggtagtagatagagtcccactttttcatctatttcaaatttcggttgaatgacttttataaattgcccactataccatgaatcattttgataatttacattcatttgcattaatcccaagctaaaagttttttctggattaagatgttctttatcaatgaatcctgtataacaatcaataccgttgttatttcgagttctcgttacatatggataattacaaggcatatctttatttaatgatattttatctaaatgtggagcggaataaatggaaaatagttttgcagaagaaaagcttttaaaattttgcatattacacctcttaatccaaaattttacctaatttaaacttcatataatttcttattgctttatcccagtcttcttcttcaggagttgtatttactttatagtggttttcaaaattccaatctgtacctgtattatctattacatcttcgacatattgtttctttaaatcccataactcattatgaaattttgaattattaacggctgcttgacctgattttaaaagcaataaaagatcgtgatacctattcgcaggactgctgattgtcttaatcccacgtttggtccttttataaccatcatttctaaagtctataaactttacgcccctatcaaaatcatgtgggaccccaacttcaaatatgtaaattgacgtacttacaatagcattaggcacaaacaaatcagaaggcatctttatagaagctaacagtgtgttgttctttaaaatttcctgattagtagttctagacttgccgcttcccgcactatcttgaattataatcgctgctttagcacgctctttattagacataaactttaatccatatgctaaaaatggcataccataattgtccgcactaaatggaggattcaataatagcttatttgcattgaattctgtatataatttagttggttctttaaaagtatcacctttctttatttgactagacccatcaccacgcaaaatcatgtttgacgcagctagcgtatacatttttgcatcatactcaacgcctaacagttgagactttttgatttgctgaattttcctattcgctttttcagaattagacccatatgtgttattggcatcatcgatcattaatttcatgctagaaactagaaaagctcctgatcctgtcgctaaatccatcaccctatcattcatacctacatctattgcctttgccatcagattagttatgtatggtggtgttaatactttacctaagctacctccatcacctaaagcgtactttaaaaattctgaatacattgatcccataatatctagagaaccactgtccgcatcaatctgtaagaaaatttctttatacagaaaggtaaatacttgcttagttatgcttgccttttcagtctgaatcatctttccaacaattttatctttatcaattagcttatctctatctaaatcggaatgaatcgctccttcgaaagaatccatcattaacttttgtttatcttgagtaatatttcctcgtttatttaagaaatcacttaactgatcgattattttaatagaatcgctttgtttttcgctttggattccttgtaaatcacacggtgttagtcctcccgcaatgtattgacctgttttagcatctgtaaccttttgcattgccaaaagcatacctgaaacatatacaacacgctgttcagttgatatattcaaattattcattagtttattcaataattttgcttttttttgcaatttttgctgtgatttgactaatacctgatgcttttcagtttcagttaatagagcattatttaggaaatcttgaaatgcttccttggtggacaaaaaatgtaaattatcgtattcatacatacgttttggtttgccattgacagcataaacataataaacctgttgcactacatgatcaggattatcaccagcaacacccactatgatacatgacttatacatctttgatttaagaattgttctcgcataatgtaacgcaccattgacagcatacttttttatagctgattgagtcgtagaaatcctacctttagcatctaacttgattagatacttagaataaagcttattttcaaagagaacaggaacatcgtattttgttatattaaaatctggctcaccaaagttagttttatttagtgttttagctccaccttttagtgcttctttcagatactcgtccatatatgattcaataccatagtcttttttggttaagccaatctcttcttccaactcatgctcaatatagtcatccacttgtctttctagcttgtaacctaatgtatctgacatttatgccgcctccctttcgaggttaatggcagcacaaaagagcgtatttaaaatatatacgctctttactaatcctattaatagttcagataatcctaagatataaattttacagttgagatagctgggggctgtaccccccccattctggaagttattctggatattgttattttttgttagcatttatcttctagtcctcttattttttaagctgtagttagtggcttaaatgttattactgcatgcaatcctaatcctttagcatatctattaagagtttctaagctaggaattgaagttaagttttcaatcttagcaagttgtggttgtttcataccgattcgtttagctaattcaacttgagaaattccttgcttgatacgctgagcatgcaggtaagctaaactatcaatagctgtcatttcttcaggactgatcgatgttaattccttttttaattcgttccaagtagtcattcttattcgttcctttctaaccaatcatctaatctgtcgagggcttttgctatttctcgtggatctgttttattgttttttttagtgtaatgactcaatataacatatctgtctttcttccaaccagcatagaaaaagcgctctggtaatggtcgaagctctagtaaaggatgacgataccctttcagaaatctagactgaggcattcccatatggttacctaactgttctaacatgctaacttgataagaaaattttgttaaaacctgtttatcttgtttttgattgcttcggtctaattgacgaatatactccttcacatctgatcttccatactcgtcctcataaaaatctacctgatacatttcaccctcatataactaatttgatatatattgattatatagcaatcaggctatgctatcaagaaaaagtatttgaaaaaattaacgtagtgaaaacagttattacttttccctcgaatcttgtgtaagccttctaaacatcttaggattaggtaaactgataaatatcttgctgtacctattaaagacgtacggacacctaacttcatagccttcatatctattagcattgctgatttttgtaacaaaattagtagtagagaatacttgtcttttacccattattaaattagatattgcacttctcccctctagtttgtcatataagtaaattgaatcgctatgtttatactgaataatcccaatgtaatttgtagtcatgtagtctaagttagctttttgcgctaatttatgtgctttaacaacactaattattctttcattcatgttatgctttttccttgctttcttgtcttgtttcattttccgcttaatccaagcaccccccatagataaccccttaattcctagaaaaatcacaccaattatcagtgcaattctccataagccatccatcagtgttaaaagagctggaaaaaccaggtaaattccgaaagctagccaaaccaatttccagagatggaatgctgaagcaagaataaagacccaaaccataatccaaaaccaatctgtttgtgaaagtactaaaaacatagcgttctccttagcattaataaactcttattacctttgtctgaacttgaggaatattacctctagtattgataactacttgcaaatcggcttcaatttgccttgcttgcttagccttaaaaacttttatttgatttttaggtacgattgccttaatcactatagggggatcgtcctcaaaagaatgatgatcatttgataataattctagcatcgaacatccttgattcatatcaacattcattactttaagcgagacagacttataattcacagtttgtttgtctcttttggtaactctattaacatacttttcttctgcgtctgtcttgttaaagactactgctatccaaatcaaactcgtaagaaagtaagccaaatatatgcttaaaaataatttcatagctagctcttttcaactactacgagccattttccttcaccaacatacttaatcttttgattagccttaatgctgataaaatgaccattaagctgcttaacgcgaacataaaagctattactatccaacggttgaattccaagcacctcacttctaaagcgccaagtaaaaactttagctaattctgcaggtgtagctagcattccaggatataaatcatatttattcatcatgaacccccgacatattcatataatctacaaaagctttctcaatcaatttacccatttttgctagatagtctgggttataaattctattgtttaatacttctggactgtttcccattaagcccaatgcttcccctgctaaatagctgtttaactctagcttccgcttactactaagtcgttgcccatctagttcaagatcatctgccatgctaagaaacgcaatggaaaacagtctatcttcaatttcttgaatatcaacttttccatcaagcaagtcttgtgcaacttttttatttttaggattcattcttacaacctcatatccgtctaattatctatttatcaatatcttacgatcttatacaaaagtatcgcaaaaatgatatattaataatgatttactacatagaatttaaatttttaaaggggcatattatgaaagataaacttaagcaatccatcatcgcaattactagtgccaatctcaaaagaattttgtacaatcaaaaactaactcaaagagacttagcagcactaacaggaatctcgatcccatcaattaatcgctattatttaggaaatggcgccataccacaaaataacttggtaaagatcgctaaagccttgcatgtttcacctaatgaacttgatccttcatatcagcccactaaagactttttatctcaactagctgaaaaaactgatgacccagatttaaaatttagaactgattatcttaaacagttaattcagaccagcaatttatctgttcaggaaattgccagtaggctcaatataaagcctattacagtctataagtggctggcaggggtaaatacccctagcaaggaaaatacagccaaattagccgatttatttagcgtcagcgttaattccttagcagatgcctctaaagaaattcgattaactcctcaacagagcaaaatattaaacgctctgccatcagatttaaccaatcagcaaacagatctaatcatttctctgatcaaatccgttttagaaaatgctaactagttttcgatagattcatacatgcttgaaattccactaattagtgctagctggcagttaattctccattgccaccagttaagtatgtattcgacttgatcatttgaatctagcatggttactgagctagttgatacttgcaaatctgaatcttctaggattgttttaatttgaattgcaagattatctgacgttgttttagtttcttgcttaactttaaggtgattatcgcttaaaatgtcgcttaataaacgtgaggactctttcaaattcagcatccaattagaaggcaacaagtcgtcaatagcgtaacctaactcatctactttgaatataaacttttcaaaattttcttttttacctgttaattccatttatttctcccaactgattaaatctatagctctttgtggagcgttatttgtttacatgtttttgcattttatcttagctggtaatttttgcattccagtcaatctcgtgttgatgtttttgcatccactcacaagcttctttagcaaaaataattgtagttttaccagctggcgtttttctggggtttactacgaatccaccatttttataatcaacttctggaaattcatcgaaaataaaagttcttacccagttatcacctttgccacgacaacagtattttctaaactcatcgatattccaagtcttgccagttaagtcttgcttatctgcactaacagattcttttacaatacttttaattagattcgtaaggcttggaaggttgattaatgtgtcagacatatcttcttgcattgctatccccagctttcataatttctatcatttgctaagccatctctcagcatctttaacaaatagctatatggtttgcctaccatgtcccatgacattctttccttgaatttatccttaactgcttgcaaagtatctacgttgcattgatataacagcccccgtaactgtttaagctcatcaagtgttggattggtagaatgattttttagcttatcgttcatccttgcaatggtaaaaaactctttgtagattttttctctttctggatcttcttctttcttcgcagaagaagaattactaactgtattactattaaatgtattactagatatattactagttgataatttattaaatacccctttagtattcttaatacccctatttagttttttaacgggggtatttaatttactaactacccttatagttcgttgcgtaacgttattctttgttgaatacatagtggtgatgtagcctttttcttttaagcttttgactaattgtgatacacgtcctggtgtaattcccaagaaatcagcaaaaagcttattactagcaaaacatccattttctccatcaagactgtcaatttcagtaatcaaggcaacctccatgatagttagatcttcatctagccaatactcagcaggtatccaaacacctttaaatttatgatttgcttcactagtctttcttttcttagtcattgttattgcctttttctttctttaagtactcccataatgcggtcacgatcaaactatttttcgttatgccacgataagaagctaacttggttaattcttcgtccaaataaataggcactcttacgcctgtcgttttctttggtgttgtcatagtgttgtcacctcttgcaattatattaaagtgttatcactttgttgtcaatgaacattttatatgtttctttgatgttaaaatgtaatcaaattgataacactattggaggtgcataaattggcttctaaattacctatgtttggtttgagagtagacccagcattgatgaaaaagcttaaatatatagcttcatacaacggacgttctgctaataaagaaattgagcaattaatcatcaaacacgttcagcaatttgaaaagaaaaatggaaaaattaatgcttaatttgtttccatagcacattaacaattaaattattaatgctaatttgtttacgctctgctaatcgtctaagaccttcatacaggtcattagacatgcggggcgttatttgttttcgagtcattgctatccccagctttcataatttctatcatttgctaagccatctctcagcatctttaacaaatagctatatggtttacctaccatgtcccatgtcattctctccttgaatttatccttaactgcttgcaaagtatctatgttgcattgatatagcaaacctcgtaactgtttaagctcatcaagtgttggattagtagagtgattttttagcttatcgttcattcttgcaatagtaaaaaactctttgtagattttttctctttctggatcttcttctttcttcacagaagaagatttattaactgttctattagatgatctattaatactgctctttttatgtaaagtgggctttactaccctactaaagcttgctttactaccctcatcaagtgggcttgtccaccctagtaaactcagccttactaggttaggaccagcttttatggttctacctaatattatttttgatttttcacttttagggtttttagctggaactgttatttgctctctcactatcaatcctttatcttcaagcagattcagccagtcattaacagattgaacagaagcatcaagaataccagcaagtgttcgattactcatatgaaaatcacctgtgacattcaacattgaaatgatctcacccatcaaaaggatggatttaggcttttttagcagttccttatctctcgaaatcgatggtgggatcattagaaacgccttagaaccttcaaattccttatccactttaaaatacctgctttccaaattattttatgtgctcttttagcactctttaaacgaaaattttttctagtggtatttctaatttctttgaaagtgctggaagttctacagcctgaaacttatatgttccatgttctcttcgaaaatacttgtctggactggctaatccaagactattagccatatcttcatttgaaaaccctaactcaagtcttttctctcgaattagatccaaattaattcttcttttcaaaatattttctcctttcgtatcttgcgattttcgcaactagtttacatgtattatattacattgccattttcgcaatgtcaatatttttatttgctatttttgcactttctaagcaacatagtgcgatttatgttatattgattgcgaaaagcgcaatagaaagtgtgaaaaaatgaacgatcaagaactacttgctagaaaaatagttagtatacgtaattctcaagatatgagtcagctagaactagcccaaaaagctaatatcgaaagaactgctttaaacaaaattgaaaaaggaactagaaaaatttctagtgatgaattgaaacgcatagcattagctttacaccaatcatctgatgacttattaaatattaataatcatgtaaagactaccaacacagtaactgaatcttctgaatatgatttaaatagaatgattgataatgccagatttttcgatggaaaacctattgatgatcatgacaaagacttagttcgaggcatcctaaaaagaatttataatgagaaatagaaaaaggtgtgcattatggacactgaactaaaaaagttgctcaaagaatcaaacataagattggagtttgcggacttacattgtccaggactacttgtacatggaaaaaacagcaagcctgacgtaatgataattaattcaagctatgatgatgaacaagctaaaaatgtaatcttgcatgaactaggacatatgatatatgacaaagatgttcaaggagattaccaaactgatgattgtgctcatacttgcagtgaacatggagcaaattcttttttaatacgtgagagagtcaaacaatatattgccttaggcaatgatcttcaaactactaactggttagactttgctaaaagcatcggcacacaagattactttcaagtgcaagaagaactaaataaatataaatttgaagaatgaacatatgcttataactatttcaatatattaaaaatgcccgcctgctcaaacaagtaggcgggtgaatttatattgagtacatataagtaatttatatgtaacatttaaatagcatataagtaacgtaagtatatgaggcaatgaatatggcacattttgaaaaaagaggtactaaatggcgcgcacaagtatcttggtataactctcaaggtaaacgtcaatttaaaactaaacagggctttttaactaaatcagcagctagaaaatgggctaatgaaatggaagtcgctaaagacgacaatcaaatatccaaccaagaccctatttttgctgaatatttcaagaattggtatgaaacttataaaacgcctggtacaaccaacggcacaaaaaaaagatacaagcgaatttacaaactcttaactgaatattttggtaaaaccaagctttcaaaggttaccaggtatcggtaccaagaatttatgaatcagtatggaaaaagccatgttaaaggtacagtctacaaaacaaatggaagtatcaacagtagcattagagacgccttagctgaaggcttaataagaactaattttgcagaaaggatcaacttgacgtggaatgatgaacgtactagaaaaatcgattatctcaatttcaatcaggtacagcaacttaaaaagtcactcttaggcggaattaaaccatcatatattagtagatacatgctcttaactatcatctacactggtatgcgtcctggtgaaatcagagttctaacgtggcacgacttaaactttgaagatcacactattcatatttctaaatcatgggattacgataataataaaatatttgactatgattctgatgaaattaataaagaaaccaaaaatcgctcttctactcgtgttattaaagtagatcagcatttactagatattctcactcagttaagaccaaacaatcatgaacgacttttcattgaccctgatggaaaaattccaacttcaagtgctgtaaacaaggttttgcgaaaacagttaaaaaagcttaatatcaataaaaagaactttcattttcacagtctaaggcacactcacgtagctatgttgctattcaaaggtgttaacttatattcaataagtaaacgcctagggcactccaatatgagtatcacggctaatacttatgcttacatgttagatgaattaaaacaaaaatccgataaacaaatagtaaatattctggacgagatttaaaataatttcgtccttttttcatgatcagataccttttggatacctttgcaaaacaaaaaccgctctagaacaacatctagaacggttatctatggagatgaggggaattgaacccctgtccaaacgcatctcgtcactgacctctacgatcatagttatattacttgaacttcactagctcaaaacgccatataacagggctagaatgggctagctaacctgttaagactctttttaactattcaggtgaggtagttaaacgtaactcgctaaagttgatactcggtgtcagccacgagtaaaccgacaaggagcaacacatgcgcttaaattaagcagctaatgcgtaagaatttttgttatttgcagttatatttaactgtaacgtttttacgtagtcgtaacctacgaaccgcagtcaatgcgggtctacgcctgtcgaatcccaaaacatccccttgagatacttattcattatagcatagacacacattacatgcgataaaaatgcttaatcaatattagtcaaacgtaccacatcacgttcaatcatcaattcttcattagttgggataaccattcctgcaactttggaatctgtttttgtgattagtccttcactaacactttcattagcttcattatctacaacaacacccatatatgcgaaagcgtcaagaaccgcttttctcacaccagtatcatgttcaccaataccagcagtaaagataattgcatcaacgccgcccatttcggcaatataagcaccaacgtagcgaataatacgattaatgaaaatttttcttgctaacttagcccgttcgctatcactttcacgcacatcgcgcatatctggtgaaattcctgacaagcccaacaaaccagacttattattcatgatataaatcatttcatccatcgacttatgctctaccttcattagatgttgcacgagtgaaggatcgatatcaccggttctagtagccattgtaattccggcaattggactaaagcccattgaggtatcgtaagacttgccatccttaactgcagtaattgatgcgcctgatcccaagtgacagatgactaactttaagtcttttaaatctttacctagtaatttagcagcacgcggtgctgtatagcgaattgaagtaccatgagcaccatatttacgtacaccatatttttcataatattcataaggaagtgaatacaaataatgtactggatcaagattacggtgataagtagtatcaaaaaccgcaacttctggcacatttggtaaaacattcataaaagcttcaattccgcgagcctcagcaggattgtgaagcggagcataatctgacaattcgtagatcttaggcagattttccttagtaataatagtagaatccttaaagtactccccaccattaacaacacgatgtcctacaccgacaatttcagttagttcttcaacaacatggtatccttttaaaaacttgatcaataagctaactgcagcttcttgatctgggatttcagttttttcaacgtgcttagtaccatcagctaacttaatctcaaatgatgaatcttcaagacctacacgatcagccattcctttggcaagaaccttttcatctggtaatgagaataatttgtacttaaaagatgaactaccagagttaattgccaaaacttttttcataaaaattaattcctcttctttcaaaaaaataagtgctttatcaattaatgattaatctttgcataccactcgttaagtttaacattaaattgaattaaagcctcttcttttttcaaggaaccaagtttggtaagcaaaacttcacttgctttggcctcatcaccgtgattttggaaaactaaaactgacttttgattaaacttgttcttaaacatatcatctggcaactctacaatcgccttcaaatagactttcttagttaaccatggcataaaatcagcgccaatcttgcctgacaaaatagacttaggaactaccaaaaaggcatagccgttaggctttaaattattaataatttgttcgattaacaacaaatgagcaaaagaatgacctttcttagcctgattttcaaaattcttggcattctcatcaactggataatagcctacaggtaaatcacttacaattgcatcagcgttaggacacatccaaggcattaaagcgtcttgatgatataactcaatgtcaatattattcagatgcgcagccacatctgtcaaacttaacatatcttcatcgttatcaatccctaccaattgataattatccttagaatgattgagtgccttaagttgagaaataattgaaaacaacaaattccctgtacccacggcaggatcaacgatttccatcttttgatcttttaataatttatgcatcaacattgctactactgtagcaattgcaggtggagtaggcatttggttaacatcaaagccatcatcattaactgcctttaaagttagaaaagtaaagacttgagccttttctttttggctaatttcgtcataatctattgcttgatacttttgacttaattcagccactgttttttcatccggtgcaccattttcaaccttaatcttgccactttctaagttatcaaaagtctctactaaggcttctgtaaatgaaacatttaatgccgtttgcaaagtttgcacacagtctaaaaactgattaaaaagtttttcaaaattttccatagcggtccctccataccttaattattttatagaaagggataaagaggtgcaaggaaagtcaatcatccgttaagcattcgataattaggcgattgttctccatgctagcatgataaatatcttgatacattttgataaacaaaagcgtggtcattaaaactaatacactacttagtaaggcactgccttttacgttatgcgtctttttctttggttttagcatttttcttttcctgttcctcatcaagctgaaaaactaaatctgatacacccttatttttctctgttaccctaataatgatgctatctttagtggttttaaaagcagccttttcaacgttaaataataacggcatatagcctttccctgcaccagatactttaagtacgttctttttatagtattcaattcggtaagtagttgcatcgcctttttgatctatgcacttaaaggaagcactattacttatagctaatttagttactggatacactgccttaattttgtcagcccgcataaaattttctagctgtacataagcataggctacttcattgacatgctgattttgattcaagtttgcttttttaacactcaacaataaattttgtaaaattagcagcaccatcatagtaataagaagcgaaaacattgcttcagctaacataaaacctttactctttgaccgcaaaagtttgtttagtcgttgcatcccaaacatgattatgtcctgccttttgataaattcgatcgtgaactgttacttgctccaggtcagttttagtcagtatatggtaagcataagcacgatctgtttttaattccatctcacgaccatttttctgattttcagctacagttatataaaagcaactaacagcaatcacagcaattataattgctataaagctctcaattactagaaatcctttaacttttatcattccgctactctcccccacagcatttgatatttcaggcttttttccattccgtagccactaaaagtcaccgtacctggtttagaataaccagttaggttgaatttaaaatgatccaagccagtaattttgatattttgatcaactggaatacttttgtgatattttccgccagagaataaaatttgattggatctagctagatatgatacgccaatagtaacctccttgatcgtactgtacctcgaagtttgatcaagtgccgtcgtaactcttttaacagtattatcaaaaatcagtttttcttgatatctttttaactgcaaactaccaatcaacaaaatgccacagcaaacaccaagtgtaattattacttctagtagggaaaagccggctaatttatttcttttcaacaacttcgccactgtctaacgtgaaattctttttagctttagtaatttgatcaccagttaagtaatcgtccttttttagatcttcaaaatctttaggttcaccatatttatccttatataactcaacttgcgtttgcacagtagtcctaaatgcatccgcagttttagtttcagcattcttcttttgattaatcaaattaggcacaattagcaaaatcaaaatcacgataatggcaattaccacaaccatttcaatcaaagtaaaaccctcttgcttgcggcgcttagccataatgtttgctaaatacttcttcatcttctctttcatttttaacttaatcctcttcttcactctattttttacttttatctttaacgtcactttttctatagtccttgcatcattgaatacattggtaataacagcttcaaatacattccaataatgcataagccaattaaaataaaacaagctggttgaacattgacgactaatttctcaattttttcagttaaatccaaaaataggctacgtcctaataacaaacagcgcttactcaagctctttcgctcagagccagtctgcaataaaactaataaactattaggcaaaaaatcctctgcattaataatttcttctaaattttttccttcagctaaatcgtgccctatcttttgtcccagtgcttgctgcaatgaacctttctcttgatctgccgcatattcgcacattcgctgcaatgaaaagccactagctagcagcagtccaatgtcataaaccaacaaataatgaatatacagcataactacttgcccaattaacggatatttactcagttttttcattgatgaataatcctgtttattgagcaaagtaacgatcttagcaaaaaaatataagcccagcaatacaataatgatcagaccaatcatgaccatatctcctgaatgatcactgctatcgctgaattgtgtcgaaataaacgattgcataaagaccagtaaaatcaccatcattatcgctaaaaccaacggataagataattcagcccgcagttttttcatctgctcctgttttagtcgattcaacgttgctaaatgctgcaaacattcaactaggtttccttgctgtaaagccaaattaacctgagttactgtcgttttagaaaagcctagtttaagcagttcagtactaaaacttgctccttctttcatgctactagccattctttccatcaactgacgcctttttggccacaatgccggcattaattcaattgaattgagcaaagaaaaaccattatctaaactatgttttaaataatccaaaaaggccaattgttcttcgccatttaacttatcctttttggaattgccaatatacttcatgattaatttctcctcctttccacaaacgctctagattttcctgccaattaacgaattcaccacgaaccgatttgcctagctctttttttaacaaagaatctgccgcaatatccatcaagcactttaattttccttgactgactaataatcgctgatacgacactgcagttagacaatttgtcagttcgtcacacctaatacctaatccctctagtcgagaaatagtttgcaaagtacttttagcatgaactgtcgcaaaaaccaggtgtccacttaaagctgcatcaactgctaaacgtgctgttccttgatcacgaatttctccaataattaaaatatctggacgatgccgtaatgccgcctttaacaggttttggtaatcaattcccgcttcgttattgacttgtgcttgcaaaaaagaagactcatgaatttcaacaggatcctcgattgtcatcactactttgttttggctcattttcttagcaatttcatacattgtcgttgtcttgcccgagccagttggaccactagtaataatcaatccgcgactcttagccagcttttcaattgttcccagctgctctggaataaaatattgactatggtcaatcccatagatgactcgaataaccagtgactcttgatcggaaaaatctcctaagctagataaacgcaagaaatattcatgtccttcattctcatatgtcattgcgccaacctgcgggcgacgatgttctgcaatatccatctgagcactgtacttaaaaaaattgataatttcctttcccgtctccaaagtaaaacctgcatattcaattagacccttaccggtccgaaatttaaccatcaagttttcttttttcgggaaaaagaaaatatcacttgctttaactttaattgcctcaattaataattcactgacaatttctttgatcttcataaaaatcctccttttttgcctcacattatttattacgcaaaaaaagtcgatttttttgtgagaaattgaaaaaaacacaaaaaattttctcaactctaaaaaacgttgatctaacagcatttcaagattaaaaaatcattaaaaagtacacaaaaaaatagcttagccattggctaagctatttcatcattaactaattaatcttcatcagccgctgcagtataaacattttgaacatcgtcactatcttcaagagcatcaactaaatgttcaaattgttccttcttatctgctggaactggagtggtgttttgtggaatcatagttaattcagcatctgctagtttgtaaccatccttaattaaggcgtcacgtacacctgcaaattgctttggatcagtgtagatttcgtatgcatcatcactagtttgaagatcgtcaccaccagcatccataacatcaagtaatacttgatcttcatcagcatcagtagttgaacgatcaattacaatgtagcctttacggtcaaacatgtaagcaactgaaccagtagcaccaagtgaaccaccgttacgagtgaaagcaacacgaacgtctgaagctgtacggttcttgttatcagtcaaagcttcaacaaagactgcaacaccacctggagcgtaaccttcgtaagtaatttcgtcgtagtgttcttctgaaccaccttcggccttcttgatggcacgcttgatgttatccttaggcatgttgtttgaacgtgccttatcaattaccatacgtaatgtaggattcccatcaggatcaggaccaccactctttgcagccatataaatttcacgagataacttttggaaaattttacctctctttgcgtcttgcgcattcttgcggccttgaatattgtgccattttgaatgtcctgacataaggatccttctttcttttttctaatattaattaacgttattatcttaactcacagtactttaaaattcaatggtgtcaaccatttaaacttgttttttctggtcaaaaaatctgtgtttaataaacaatactaacattatcagcaaaattgccgttaaagcccctgctccatcaagcattacatcgtgcacgctcggtgttctatcacctgttaaaaattgatgatattcatcaaacgcagcaaatgcaattgccataaaccaagttaaaactggtgctacccatttgattttgaaaattcttcttaatcctaaatagccaaaaccacctagtaaaaaataagaaccaaagtgagccattttacgtaaaacaaattgggccagccctgctcgaccatcaacttgcacattgtgaatacgaccaccgtaagtaaaatcccagccagtaacgatattctctaaccagccaaaataacggttaattttattgtcatgaatttcctgctgttgataagtcattgaactagaaatgaacaatgcaactagcaccaataaagcaagcagtaaaaagattttttctcgtttagtaaaatgaaatttatccattgctatttcttctctcttttttacttcttactttaacaaaaaacgggttaaacttgacccgttttataaattatttaactttgcttaatgcttcatcaattggtgtgtccccatcatgcataataattacttgatgaatcgtattatcatactttaggctatcaaccaatacctgagcaacatcatcaatcgaattttctccaccttctggagtaaatgatgtcttacccgttgctggcttctccattaagttacctggttgaatgatcgtataatccaaattagtattatgaattaaccattcatcagaaaagtacttagcaatatcataatcaataatgcttgcaagagaaggaatttctgcccacttgtcttggtcaagcgcaaaggcggagcttagttgaacgtaacgcttaacgccattagcttcagcagccttcatcagcttaactgcgccatttaagtcagtttgcaataagtcctttccacgagaacctgctacaaaaatcactgcatctgggtgacctaattcttcggtcagcttattaagcgaatcatgaaaatccaaatgttgcacccgcatattaggagaaataatttcaacagtattttctcttcttgcacctgcaattacttcatagccttcatctatcaatcttttgattacttctttgctcactctgcctgtagcaccagctacaaaaactttcattgtttttcctttctaccagctagccttcttaacacctggaagttgacccttatgagctaattcacgcatacattctcggcataagccaaacttccgataaactgaatgcggtcggccgcaacgttcacagcgcgtgtattgtctagttgaaaattttgtttcttttttgttacgaataatttgtgatgtttttgccataaatacctcttatctgcgtctatttattctttgaggcgctggctttcttttgctagttaatagtcccaacgccaaaataataattccaattgccaatacttgtccagtcattaacatccccacctttctttttgactcttactttttgttggtgtattatacatgcttacctataataagtaaagagatttgattgtaaatagaaagcgttttacactagtctgatacattccctgtcaagtagacagtagaattacataaagcttttattcctcagttgattaataatcagctgaggattttttggcttctcttattttcttttcgtgtattttttgccagtatttctcaattcgatgatttggtgcaatagggcaattcttaatattgcctttcatcgcttctttgcgcatttcaccagcagttaaaccgttaaaacgtttctgtggatcttcattaatgtagtaatctattgtcttacaaatagaatcattaagttcatcataactggccacttgaggatgaagaataactcgcatttctttgataatgccttgccagccttccattggaccattatcaatacagcagccaacacgagacattgattgcgtcatgccttggtcttctaattggttttggaaaggtgcgcgagtaaattgaaaaccacgatcactatggaaaagcggatgagcattagggtatgctttaacagcctgcttataggctgcttgaactaaagcagtatcgtttcgtttactaattgcgtagccaacaggatagcgatcatatagatcaaacacagtacatagatatgccttaggcaggttagcagcaacgacttcagtgatatctgtacaccatttttcattaggtctagatgcattaaagtctctttttaacttgttttcggccgttttctcaggcgttgtatgcttgaactttagcttctggtatctaggcttttgtgatctaatgccattgatacacatcaagcggtaaacagttttatgataaaccggcttttcatcagacatctgtcgattaactgccatggtcatcttttccgtcccaaacagactgttgttagacttagttatttcaatgatctttgcttcaatctttttgtctcgttcttcacgcttactcggcttgcgcttaggatcaaagtatttgtaataagctgagcgtgctattttagcccatttgcacattaaatcaatcttccaattgtacttttgatggcagtcatggattaactgatatgtttcttgtttccagcgtctttttattgcggcttgtctgtatcttggttgtccggcaagcacatcctttctaactgatctaatttttttaggaattcgttcttagtttgttcttctttgagctgacgctctaattccttaatttttcgattagccagttctaactcagttagctcttctggcttcttatgtctgcctcgtttatctgttaatcctgtttcaccattagctagatatttgtgtgtccagctgtaaacctgctggtaagaacaatcaaatttgacagctgtttgagtgtaattcttgtcgtgattaagacagtattgaacaatctgaattctttcttgctgggtagtttttcttcttgctttagtcatatagacctccggatggggatcatagtcccgattttctatatgactattatacttggaaacccattctgatactgttccattgcttctaatgccatatttattagctaaagaaggtaacgacattttgccagctaaatattcttgaacaaccttttctttaaatgccttagagtaatgattattgtattgagcattacttagaagggtatcacgattgctttgatattgatgaacccatcttcttacttgcatcgctccacttttacttggcatcttaagccgtttagctatttcaacgctgctcctattaccattcaagtattgttcaactgcccatatcttttgatcgaatgaatatttactttttctggacataaaaaatcccacctccatggataattgaatactttatgtatttaaatcgtccactttagtgggattgtatcagtcacagttctttttaataggtaaaatttatttgaatactttcatctaagaaaggaatagaatgaacgaaaaatgtaaaaataagtcgccaggattcttatctttttagggagtaattatttttaaatagagaaggatgagaattaattggacgatttaacatcaacaaataaaatgaaagccatcacttggcctgttttgaccttgatggcactttgtactgttatcggcttggacgatatcatgtacaacttccaaaaccaagggatgccagttatcacctcttggattatcatgtgtttgctttatgtaacaccttactcattaatggtaggacaattaggttctacgtttagtgaagaaggtggcggactttcatcatgggtccgcggtactgacggagaatttttaggttacttcactgcttggacatactggtcagcctcaattccttatgctgtagactccgctaacgaaatcattgtcgacctaggttgggcattgaccggttcaaagggattccaagataaaattcctactaccatgtttgctgctttgactttcgttgtgttcattgttttcattatcgttgaacaccactttgccaactcaatggaattcctttccagtattggtggtggtttgatggtcattatgactgtcttgtttgttttccttgcctttgttggtttggcaaaatcaggcggtcacatggctacccaaccatttacttggcacacaatcattcctaaattcgacttgcactactggtcaaccgtcggaatgttaatctatgccatgaatgggtgtgaactggttgcaccatatgtaactaagatgaagaaacctaagtcagacttccctaaggcaatgattactttagctatcatgactgctttcttaactatccttggttcatttgcacttggtatctactttgacgcataccacattccaaacgacttgaagatgaacggtgcttactacgtattcgacatggttggtaaacaattcggtatgggtaaattcttgctttacctctgggctgggacatcattattgttcaactgtgccttggttgccgtattgcttgatgccatgactagaatgcttatctccgacactggcgataagtacatgcctaagttcttacgtaagaaggacaaaaacggcttaccaattaacggttacatcttaactgttgccctttcatcattcatcatgatcttaggtatcttcttacctgacatgaacgatatcttcaactggttgcttaacttgaactcaatcatttcaccaggtgttacctgctggatcttctactcattcatgagagtaagaaagaactcaaagaagtacccatcaaaatatgtctacattaaaaacgataaacttgcttggcttgttggtcttgccttgttagttgttactgccgtagcaaccatccttggttttgcaccacaagatgttaagcaaggcagtggcctttggtggtacgaattgatcattaatattgtagccgtaattgtcttaattggtttgggtgcaattttacctggaattagacgtcgtgaagaagaatacggtattgcttttgacaaatctcaatggatttggatgggaattatcattatcggttctattattcttgacgtatggcttggtagtaccaagattccagcaagaatcacaatgattatagttgaagctatcgctgcattaatcattacttggattgttggacgaagaaaaccccaacaagcaaccatataaaaactaaattacaaaaaagctcgcaaataatgtcattaattatggcatgctttacgagcttcttttttgctcaaattgatatcactttcactctatattctataatcatatagtaatttacaattattttgtaattttatatactcaacaaggttagcactaagtgttatactaaagtataatggagataaggcatatatttatagaattatttaaactgagactgaataaaatgaaaaatataagaaagaagattatagtatttctgctagccttggaatgcttagctttttgtatatcctttaatagcaaagtgtatgcatcatggagtcccgcttcagaatggaaagaaaatggctatcctactgaggactggacaacagatcaatttacataccatcaaataggatttattaatgatcctaaaaataatcaattgttgttatatgtagacatttgccctgattctaaaaccaatagaaatagtcatggatatgaaggtggatatcgtcaattgcagccatcagcctacaatataaatgttggtaatgctacatacagtgttaatttagatgtcaatccatggaatattcaaaatggaaaatctggatatgcaggaattggagtatgggatcctcaaactaatcaatataaagcaactaaagataatctctgtcattattatgcagatagtgatggccgccaatcggccataattaagattccttacaatatgtttaacagagatgacctaaacggatcaactaaaatgacaatgcaaaatcctaatttgggtggcaacacaaaaatcacaatcagcggagccagcaccggcccatacatccctgccatcatcgcttttgtcttagcttcaatagccgcaattagttattaccataaaagaaagttagtacgtcatgaacatcagtaaaatatccccaaaaatatttcattttggaaatggtgtcatccgtgcctttttctttggcttgattataattagcttcttcgctgtgctctcatctactaattggctgccagatgcaaaaactacgaccggcttaacttacataatgtttgcactactattaattttagttttaagctggttctcctttccaaagtttcaaatgttcttaaaaacaatttttatcaagcataaatggattacttctattatttgtttagtccttgcattaatttggcaaattcaatttgtctacttcgtacatcccgcaatcggatttgatgttagtgctgttcacaataccataatcaatccgaatctacctgaattaagaggatatttcagtgttaactacaacaacctatccatcctccttactctaagacaagttgccaatatctttcattcaaccagttggttaacaatggctttatgttcaacacttgttacagatttaagtgttttagtaatcatcgctacaattgcgataatcaattttcaaaaaattcccaatatcatttatattctagctagtctgcttagcatattccctatttgcatggttccttacacagatgtatggtgcttgctccctatttcactttcaatttttggctggagcatcgctacccaaaaatcatatctagttgtcattcgttttttaggagcaattttatccggaattagcttagcatgtggcgtttggatcaagccttcagttgctgtttggggtattgccgcgattttaacgagtttactctatattttaaaaaacaacaaagtaattctaacttctattttctgtttaactattgcagcaagttttgttttagcctatcaacctcttaaaaaagcggttcaagatcagcattacatcatcgttaatcaaaaacgccaaattccgatgatccacttcatcaacgttggtttaacacatgatggtgcctatgatccaaaagcagctttaaaaatggatgagcttcctactaagaaacaaaaagttgtctattctaaaaagatgatcatcaagcgtcttaaaaaacgcggtccattgggttatttacaatttctagttaaaaagcaaggtctaaatactgcagatggtacattcggctggctgcatgaaggccattttattatttccaagcagccatcagaaggctggcgaggattcttagcggaatttatctatccaaatggaaaatatgttattgagtttagatttatcgctcaaattctttggacaattattatttttgtattgctattcagttttcaaaaaggcggctttattattcaaacgctaagaatggcactagttggcggttttatattcttacttctttttgaaggcggacgtagtcgttatctagttcaattcttacctattatcttgattttaacagcactttcagcagacactgctaaatataatttagataaaattttgacagcaattctaccgaaaagaggtttttaaatatgaatcttagtttaatttaccctactatctctttaccaatcattacaattagcatggttgtaactcaaacacaaatagaaaaagtatgggagaaacagctagaagactggcgtcaccatttatttatcatattgtgttttactactttttacatactccaaactgtttgtattgcaaatgtaaccatctttacctttaaagcaattgcttatatgtatgtcattccaacaattatggtattacgcaacaagcaacatatttggtggtttttgctttttatcacaccactaattccgttacttattggtcttgatttaaagagatattcatttataaatatccccgctactttattgcagatttcatccatcgcattaatctgctttattctaaatcattgtcaaaatctttcatatcaagttaagtatatcattgccctttattcagggagtctcatccattttgtacgtctttatatagaaaatgaattacacctcacatttttaatcgctttgacaatcggaactactttcaccatcattggtgaaagctggcgttattattttgaaagtcgacatgaagaagcaactgctaaattgcattacgaaagcaagcgtgatgaattaactggtcttcttaactttcgcgcttttgaccaagaaatgaaaaatttatctaaaagacctaatataactaatacctatattggcgctattgatatcgatcattttaaagtaatcaatgatacctatggtcacttaaatggtaatattgttctgcatactttttctaaaaaactgaaacacgagattgataaagcttttgctcctaattgtttcgtttaccgctttggcggtgacgaattttcaattgtcatttttaatgctaatcctgaacaaatcatcgctgcactaaacaatgttgaacaatatttccgcgataattttatcaaacttcctgataataaaactaaaataaagttctcgttttcatgtggcttcacgaagcatttatctaatgaacatttttataacactcttgaacgcgcagatgatttagtttacaaagtaaaaaataatggccgcggaaaaatattgactgattaaaaaactaaggaaatgaataatgcttaatggatatttaattggcgggattatagtttggttatatgccctttcagtaactaatcgtgcacatttatttgctttttattattgggttggtgctattggtgcttttcttttaactacttttgcatgccacaaatattttgtctggttcctagctagcctagtgagccgcggagctggtgtgattggacagctgactcatagctttactgcttatccgtttccagctgctttagacattcaaactacttttggatcaattaccctattagttgactatgaatgttctggaattattgaaacattggcatatttaagcttattaattttctttcctatttacactcgtcgtcaaaaggttgctcttagcattatcggtgttttttggatctactttattaatatttgccgattaggtttaattgggataaccgttcattaccttaatttgcgaaccctgttctgggttcacgacgttataggacgtatctttttctatatctttacaattcttctatattatcaagtcttcactcattcacaattagtctcaaacttactagggcgaagcaaattagattaaaaaggaataatcatgtttgatcaaacagtattacaaatgggattctgggctacttggcttttaattcctgtcatatttgaagaaattccgatgataattaattttattcggcttcttcatcatcataaaattcgcaaaaaaactcctctgccagattttttgccagtattatcaattattattccgacttataattcatccaaaacactttatagatgccttaaatcgctagctgattcagattatcccaaaaatttactaggaattttcgttgtcgataatggcagcaaagatgacacctttcaagtctttgctaaagctcaaacggactatccacaattattgatgcggtggcttacttctcctcatggaaagtcttctgcattaaatgctgccatttataaagcaagatcccaatatatcattaatatcgatagtgacggtcggttggataaacatgctttaaacaacattgttaaaaaattctcggctaatccaaatatcgatgctttaactggaacaattttaactgatcgtcatttaattaaaaagccgcacaagcttttgaagttaaatgaatattttgaatattgccaaacctttctagcaggaagaaatattgaaaataacagcaatcatattttcacgctttctggtgccttttcggcttttaaacgcgagaccttaattagaacgtatctttacagtaccgatacaattagtgaagatactgacatgactttccaaatccggtacaatttaaagggaacgatttcattttgtgatgatgcaattttttattctgaaccaattagcggcttcagtgaactatatactcagcgacaacgctggcaacgcggtgaactagaagtcattaacaaatatttatcgcaagttttatcttggaaacaattcttcagtaattttcaaattcgtcgtttaatcattgatcacacagtcactttcctaaaaataatttggatgtttgctatttttatattattaggatttggctattcatggatatcattattgttttcttatgcggtaatttatcttttatatttatttttggagatttcgagttcaatttgtgtttacatatacttaggaagctttccagaagaaagaaaattttatcttaaaaatatttggatgatttttttactgcttttttataatttactttgttctttcattcgttgtgttgggattattaatgcttcaaccaccactacaacttggcaaggaattaatataattcaagaaggtcaacaggttaaccaaatcataaaaaaagatataagacaattattgaaaagaaaaaattatgacgactaaatatcatacttatatattcacaacttatttgaacgcatcacatgctattcgttggagtaaaggaatcgggcaggctcattcccatacttatgaaataaggtatagctttcatattaataacggcaaattgattcgtttcaatgaaattgaaaataagattgctgaaattataaaaaagtttaataatcaatttttaaatgaagttgagccattcaccaaagtaaatcctactttagaaaatttaaccgattatctattcaatcgtttcggcgaagaattaaataaattgaattgtagtttagatgaaatatctgtaagtgaatcaccaatgagaacttatcagatttcaattaggtaacagaggtaatagtaatgagtaagtggtataacgtttttcaacctatttatcaagtcgataaagatttaaatgtaacaatttcacattatgaaatgttattacgagatgaaaatgattccttcccaaataacgatttcttcagagtaattggaactgaagaagaaaatcaaaaatggattttagccgaaaaagagtcaatagatcaagcttttgctaagtaccctgatatctgtatcaatttaaacattgagcctattcaattcgcatacccaagcgtttggaaatttattgaaaatatttatagtaagtatggtaaaaaagtggtcattgaagtaactgaacgtcaacttcaagctggaaccttaggtaataaacaatttgataaatctttccaaagattccatgatattggcttggacgttgttttagacgatgttgattctggtggtcatagctttacttttgtagatcaccattctgatataatcagtgggatcaaattatcattactagacttcgatcctattagttctgatactactattaaatttattgatgcttgggctagctttgctaaggaaaaacacttagatctagttgtagaagctatcagaaataaggaaattgctcaaaaatttgctggtaataaacatattttccagcaaggttattactggcaacagggagtaaaactagaagacttaccaacggtttatggatttaagaagtaattacaaaaagacagaattgattgcttaattctgtctttttttacatgtatttatttaaaaatttgtttattcgcattttatattcatgcggataagtttcgaatgaacgcgcatgagctgcacttttggcaatccataactccttaggaccatttgtagcatgatagttttgatacaccattttagttggcacaaaattatcttttccaccatggataaatagcattggcttagtattcttttttaattgcttaactgcagatgcatcccctaaataaaagccaagatttgctttacttacaccgcttaatagcgtaactgcacttgtagctactgcttgcggcataccgtataaatcttttgcttcatgcatgaattcagctttcacatcactatacccacagtcttcaatatatgccttaacttgcttaggcatcttgaggccactagtcatcattgtggttgctccgcccatactgacgccaaaaattacaatctgttgttttcttccttcaattgataaatctttattgacccattttctaacgtcatatttttcaggccaaccatagccaatatacttcccttgactttgtccatgagcacgcgcatcaggaatcaaaacattatatcccaattgatgaaacatcgccgcatagggtgccatggtatttttattattaccaaatccatgcagcaacacagcagtcttttcagaatgcttatttggaatataatttgcatctaagcggtagtttgaagaagcagacttaatataccaatgctcttttttagcgtttttataccactttttattctgcgcaagtgaatctttctttttcttgctagaatatttattcagcactgtcttttcacctggaacaaaagcaacattaaagaaatatgcttcaactgctccaattaaaacgattaaaactgtggcgactatccctattatccaccatacttttttgcgttttctattcaaaatgtcaactcctatataaaataatatagaattaattatacacttttgaattttatatggtatattgacattttaagtaaaatattgcctatacaaaaaatgatggcttacgccatcattttttgttattaatctaaatcttcaccgtgagattcaattaccttcttgtaccagtaaaatgaatccttaggcattctcttaagagtacctttaccttcatcatcacgatcaacatagataaaaccgtaacgcttagacatttgaccggtaccagctgatacttcatcaatacagccccaagtagtgtaggcacggacatcaacgccatcttcgatcgcacgattcattgccttaatgtgcattctaaggtaatcaatgcggtaatcgtcatgaatcttaccatcatcactaatcttatcaacggcacctagaccattttcaactaccatcattgggatttcgtaacggtcatacataacttcaaggtagtattgcaagccatctggatcagttgcccaaccccattctgaatacttaaggtatggattcttagcaccagcggcgaagttaccgccaaccttatcttttacttcatgagttgtgataacgttgctcatgtagtaagaaaaggtgtacatatcaactttaccttccaacatatccttcttatcttgctcagtaatgtctaagtgaacattgtgttctttccaaagacgcttagcaaatgttggatacttacccttgcattgtgcatccccacagtagaaaatattttgttcccacatatggcggttagtcaaaatatcctttggatctggggttaatgggtaatcaacgattccacaaatcatattccctaccacataatcaggatcaatttcatgagccaacttaactgcccgagcactagctacgaattgatagtgcaatttctgatatgcatgttggtatgccttatcatcagtcacattattgccaaaagcactaagcatcaacagggttgaattgatttcgttaaaagtaagccagtacttaactaatcccttgtattcttcaaacaaagtcttagcatatttcacatacatatcgatcattttacgatcttgccagtcatgatatttttcactgaggtaaagtggatcttcatagtgagaaatagtaactaaaggttcaatatcatattttttacattcttcaaatactctgcgataaaagtcaagtccagcttgatttggcttttcctcatcacccttagggaagatccgagtccaagcaattgataaacggaaggttttgaaacccatgtccgcaaacatcttaatatcatctttgtaatggtgataaaaatcaatcgctacatggttaggataatattcattaggatcaattgcaccaactgccccttcaggaagtcccgcacctggaactcctggtgttttttctaacttaccatttaacttgtaagtcaacattctaggtgcatctaagctacctgcagtagtaatatctgttactgataggcctttaccatcttcatcatatgcaccttcgatttggttagcggcagttgctccgccccataaaaagttctttggaaatgacattatgattctccttttctgaaagcatttacattaattatagactaattggtttgaacttgaccagttgttttaacttctgcgttactgccttgcaaagacaaaatttcttgaccaactttaacttcaccttgagctacttgctgtacagattcatatttcttagaattcgtaacaacaactggagtagtcacttcatagccagcagccttaatttctttaatattaaatttaaccaatggatcacctgctttaacctcttgacctttttctactaaagtcttgaagcccttaccttgcagattaacggtatccattccaatgtgcattaacacttctgcgccatctgtagtgttaagtccgacagcgtgtcctgttgggaaaactaaagcaatcttaccatcagctggggcatgaagcacaccttcgcttggttcaatagcaacgccttcccccattgcaccgcttgagaatacttcatctttaatttctgacaatggttttacttcaccgtctaatggtgaaactaatttggttgaaggattttccttttcttcacttaaaattgcttgtacaggagcactcttagtaatattagctgcttcattagcggcgtcagcaactttttgtgcttgttttttattatattcagcatcaactgattttttaccaaagagcatttgaagtgcaaaaccagctataaatgctacaataccggcaataattacgccgacaattgttgtcattgatcctcccttaggattaatgtaggccggaattgcaaagaatcccattgatggcataatgtacaatactgaatgaaaggcaccaatgattgcacctgagactgcaccagcaatacagcttaaaacaaatggcgtttttcttggtaatgtaataccataaattgctggttcagtaacaccgaacagtcctgagaaaaatgcaccagtagctgtttctttaagttttttgtccttagtttgacggataatagctaaaacaacaccaatttgcgcataacaaaccatgcaggataaacctagaattgggtcataacctaatgcggctaaatctgcagtagttacggcaacgattccccagtgaacaccgaaaataacaagtacttgccaaagagcacccattaataaaccagcaataattggactaaagttgtaaacacctgacatcactgcaccaattgcgtccccaacccaagtcattacaggaccaattactataaatgcaactggtaaagcaataatcatagtgacaactggaaccaagaacatttgcacaactgatggaatccactttttagcccagtgctcaataattgaagcaaaccaaacggtaaataatactggtaaaactgtagaagtataattcatcgtgataaccggaatgccaaagaaagtcgtgtgaatctctgaggcaaaagccgttcctttaaacaatgtacctagaacagtcttacttgcagctaattgaaccatagttggataagttaaggttgcaccaattgctaatccgataaattgattcatgtgaaatctacgtgctgcagttacccctaagaatactggtaagaagtagaaaatactatcaccaattgcatatagaatttggtaagtacccgatttagtagaaagccatcccattgcgcctactaaaactactaggcctttaataataccgccagcactaagtggagctagaatatctgtaaaaatgcctgaaatcaaagcaacggctttatccacaaagctagaattatcttcaacgtcatcatcaggaacttgtccaccgccattaaagccgccttctttgacaacagcatcgtaaacatcagcaacttcattaccaatgaccacttgatactgaccaccagctttaacaacagttacaacaccatctgtatcttttaaaacatcatcgttagcctttttttcatcctttaatttaaaacgcaaacgagttgcacagtgaacaacactggtcacattatctttgccaccaacattttgaatgatggtcttggctaattcatcatagttcttagccatttgcctttcctccttaaaataaaaacccaagctactcaaaaactaaagaacataaatgttcaacgtctttcagtaactcgggttcatgcctaatcttcttagtaacatacctaagtaacttagatatttaattatcttgacgactagttacgcgccaaatatgtaaaacaagataaaattcatcatctgaatctaaatcccatcccatttttgcatgtaagtaagtggtgatccgctccgccgtctcatacgctttgctatatttgattttcataaaacctagcattgcaggatcaagtgaagcctcctccttttgcttatttcgtaaaaatctaactaacaaaatgcgcaaatgcgaaacaaacctactatagttaaaggagctcgtatcaagttgcattgaatattgcaattgaataatatcgattatcccacgaatcaaatttgtaatctgaattgtttcttgtacttgagaaacatcactcttagcattaaccaggtgataggtcatcaaaaccgactcactctgcggcaatttaatctgcatctcctgattaattagattgaccacttttttagctgccgcaaattcttttggaaaaagattttgaacttcccaactattgttagcgggagctatatcaatatgatctttaattcgcgtaactgcaaaatcaatgtgatctgctaaagcaagatactgaaagtcattgaacttaatctgaagcagaggttcgaccagctgaagtaccttattagttacttcaattgttttagggtcaaagcccttaacttgatccacttcgtctttagtaacgaagcgacgttcaattttgctttcatcaacaggatcacttttttttagaccaaatcctacgcccttgcctaggactatttcttcttgaccttggttattttcaattaaggcagcactattattaaatgttttaagaaatttcataataattcaccaccttagcaaaaaaagaaaaagctatcacaaataatgatataccaacgcaacattatttgtaatagctaagacctgatcgtatcagtaatccgctcacttacagttattataatagccaacattgtaagcggtgtcaatataattttgtgaaaaaatgcaaaatattttacaatgaactaaaaagcgaggtaattaaaatgaaattcgttcttgcacctgattcatttaaagaaagcatgacagcaaaagaagtctgcattgcaatgaaaaatggtattcaaaaagttattcccaatgcacaaataaccgcagtaccaatggctgatggcggcgaaggtacaactgattcattggttgacgctacaggcgggcaaaaataccaaataaatgttaccggtccgcttaatcaaaaagtatcagcttattatggcatctcaggtgatggacaaactgcaatcatcgaaatggcacaagctagtggtctctcttatgttgcaaaaagtaaacgaactcccgaaacaattttaaagactacaacttatggaaccggcgaattaattaacgcagctttgaagcaccacgttaaaaagattatcatcggcctgggcggaagcagcacaaatgatggcggtgctggtatggcacaagcacttggtgttaaattttttgatcaaaatcatcatgaaatcacccaaaagctagcaggcggtgctttagatcaaattgtcaatattgatctttcttcaattaatcctcgtattaaagatacccaatttttattagccagtgacgtaaccaatcctctaactggacctaatggtgcaagtagcgtcttcggcccacaaaaaggcgcagatgatacaactgttaaaattctagatcaaaatttatctcactatgcacaagtaattgagcagactattgataaaaacgtcgcccaaatttctggtagtggtgctgctggcggcctaggcgctggcctgatcgcctttactaacgccagtattcatccaggcgtgcaattaattgcccaagaaactaagcttgaagccaagatcaaagacgctgactatgtttttaccggcgaaggcggaactgattttcaaactaagtttggtaaaacaccctttggtgttgctaaaattgctaaaaaatatcacattcctgttatttctttagcaggctatttagatcaaggtattgatcaactctatgatgaaggatttaccgctatatttggcattcttgctaaagcagaagatattgagcaagccctaaaagatggaccaataaatgttacccgtacaactgaaaatattgttcgtttaatcgcacaaaaataagatgagctcgatgcccatcttattttatttcgttaatttcttaattaagccttcacagccacgataaatttcattatacgctgtttcaaaatcatttgtataccaaggatcatcgacatcagcataagagccagcaaactctaaaattttatgttctttatgctctgggtctccaccagtaatgcgattcatatctgcgaaattttcttcatccatgcagattaaatattcataattatcatagtctgagcgagtcatttgactagcacgatgaccacgatcatatggaatatgttttgcaactaattcccgttgtgcacgagcatcaatcccatgacctaaagcatcctgcgtagttgctttagattcagcagtatattgatctgctaggttattttcttttaacaaatattgcatcacggcctctgccattggtgagcggcaaatattgccatgacaaacaaacagaatttttttcattaccttttcttcctcttagttagtctatttataaccggccaaataatcgccgtaataactccaactgttaagccaacccaaatctcctgcgacaaagttacaagaatgccactataaactcgactttgcaatgcggtcatcgcctcatttgaggcaagccacaatgccacaaatgaagcaatagtagctagtgctagtggaattgacgccgaagagcgaccaaataaaatcaaaattgcggctaacaaaaataacaaagccactgcaaaaattgaatactcataaattgtaataatatggttcacatcttctgaatcttccttcaatttatgattaatttgcttgactaaatattcattgataatttcttccaacttacttttactagttaagcctaaatctttagtggtcaattttccctgatcattatatttttcacacaatctatatagatcagcatatgataagttaacttgatatttcggcggcaattgttctaacaatgtcttttccaaaccagatgcttcgagtaactcaacccctgccttcaaattaggattatctgagtcatccactactcgattgattacttctttgcccatcgcctgtgtatcgtttatttttaaattcacattgctagtcattaataaccaaaaagatactgcggctaggccgaccattatcaaacgtagtattattttgacgatgttcttcatctaaaaatcttcccctaacatctacttttttcagatggcaaacaattgcaaggcaccatgtcaggagcatccttttctttcaatttaagttcttgctgcatcgtcttaatatcgcccttagaaagcggtgcttctcttagcaactgaattaatacctcacccttgtgcatatcacacatgttttgcatcatatgtaaagtaacttcagacatcattttgcgctgactaatagtcggcttataaacaaaacaccggccttctttacgcgtctttagcaagcccttttgcactaaacgccgcattagcgttttaattgtggaatcggaccaatcctttttaccttgtagttctttgattacttggccagtacgaacttctcctaaggtccaaataatacgcataacttcccattctgattgggtaatggaattacgatcgtctttagtttctgccataaaacatcacttctaaatccaaattttttactaaagaacaaattttttcaaagcctttgcaatcccgttgtgatcattatcatcagtaacataatcagccttatctttgatctcactaatggcgttacccatcgctactttcatgaagttgggattagaaaacatcgaaagatcattgccttgatcaccaaaaatcatcacgtctttttgggcaatttttagccgtgaagccaaatccattaaagcattaccttttgaagctcccaaggcatttaattcaataatactgtcaaaactgcgaacaatgtcataagtctgaaaagcccagtcggggaaactattccacagtttttctacctggtcagctccttcagttgaagtaaaaccgactttgttaaaagtaaaatcttttggaatttcttttcggtctctaactttcataatattatcggtcaaagccgcattaatttgcatttgcacagataaatcccgatcagttgtaatgaaatacttagtcgtctcaaaatgtacatttacatgacttaaacgctgaaaacgcaacatattattgaagtcttgataattcaattcctgactcattaaaacacgaccagaaattgtttgaattactgcaccattaaagacgattgcatattgatcatcaccttcaattcctaattgcttagcaaagttcaatactcctgataatggtcgtccagtagctaaaacaaccttaatcccattttgtactgcgacacgcaacattctttgcgtttctggcaaaatagtattattgcttgataataaagttccatctaaatcaaccgcgatcaatttaatagccattttaatccctcggatcttaaaaattacatctagcattaattatacaaaaagccgtgatttaactcacgactttttacttatcgattattcaattaggattttacttacccatttccttttcgaccactttaacgatacggtctacataggcatcagtttcttcttgagttggtccttcagccattactctaagcaagtcttgagtacctgatggacgaacaagtacacgaccatttccagccatatccttttccactgcagcaatttcatcaagaattggttggtgttctttccagctcttcttgtcagcaaccggaacattaactaggcattgtgggtaatctttaaagtctttcaaaagttcacttaatgacttaccagtcttcttcattacgagcattaaatgcaaaccggttaacataccatcaccagtattatgataatcactcataataacgtgacctgattgttcgccacctagattgtagccgtgagcacgcatttcttcagaaacgtaacggtcaccaacttgggtacgaacattcttcaagccttctttttcaagagccttagtaaaaccaagattactcattacagtagtaacaatggtatctttcttcaaacgaccatgttctgccaagtatgagccgagtacgtacatgatgtggtcaccatcaacttcattaccattttcatcaacagcaatgcaacggtcagcatccccatcaaaggctaaaccaagttgagcaccttgcttaacaacttcttcttgtaacttttcagtatgcgttgcaccaacatgatcgttaatgttcaaaccatctgggtgagttgcaatagtagtaaagtcaacgccacaatcagcaaacagtcttgagatcaatgcgcttgaagcaccgttagctccatcaataactaccttaattccacccaagtcttctggaatagtattttcaataaattgcaagtatttagctgaaccttcgtggaagtcagttacagtacctaatcccttagcagatggacgaggtaatttatcttccttagcgtcaattaatttttcaatttcgccttccatttcatctgaaagcttcaaaccatcgctaccaaagaacttaatcccattatcttctacagggttgtgtgaagctgaaatttgcacccctgcatcggcgccttgtgctcgtactaagtatgaaagacctggagtagtaattacgccaacctcaagcacttcaatcccaactgaaagaaggcctgaaatcaaggcatattcaagcatttggcctgaaatacgagtatcacgagatactaataccttagcttgttcgccgtcttttttgttcttagttaaaacataaccaccatcacgacctaatttaaaagccatttctggagttaagccttgattagctacgccacgaacaccatcagttccgaaatattttaacatttaataaacaacctttctcaaattaattattcgcattctttactttaattgatatctgtacattttcaggatcaacgcgagcaactcccttaggtaaaactaaagggtaattctttacagttgaatatgagattcctttcagatctacatcaacatccaactgcttaatctttgctaatgtttccttttgtccatacagtgttacctcatcattcttggcagtaaccgaatagactttattatttttttcatttttaggctttaaatttagcttaactttctttttgaaaagcgatattggcaaactagcttttactgtagatggattaatcactgcatttaattgacgcccttttttatcttcagctatcaaaataacttgacgctcataatcatgattaatgccattaggtaaaggcaacttggcaacgatctgatcaatctgatttacttcgcttctagcaccagtaacctcaacttgctgcggatcaacactagccgtaccaatattatatccattagcaacagcatttttattatactctatttgaacgggcatggtacgagattttcgccgttcaatatcaacattaactgttgccgggttaatcgtgtaagataattgactatttagtcccgtaacttctacctttacggtttgcttacctattttcttatgagttagatcaatataagcacggaagctttgagtattaacagtcgaagtaaccaacgcattcgaaccctccaaagttatcttaaccttttcaggataaccaacaacatagtatttatctgtattaaccgaaacttgcagaggaacactaattgtctgcgtttcattagcagtttgccgtgtcttcttagattcaccctgtgtaacaaaacctgtttgagtagagtcaatgtaaaccactaataagatcgcaaacagcaatgagattattctgattacccagcgtttatcccaaaagtctttcatcgatctgcaccccatttccagactttattaatcacacgacgaatccatggaaccttcttctcttccttaggaacaagttgagcattcaaatacttcaaatattcttcacgagacaaatctactaaaaagcgcccgtttctagtaatagttacgccaccagtttcctctgagacgacgatcgttaccgcatcggtaacttcagaaataccaacggcagctctgtgacgcgtgcctaaacgcttaggaatcatgctgttatctgacagtggtaaatatgctgctgcaacagcaattcgattattattgataattaccgcaccatcgtgcaacggcgtattagggataaaaatattaattaataattcaccagaaatatccgcatccagcttgattccagtttcaatataatcatctagccccgtatcttgttgaatcgtgattaaggcaccaattcttcttttagacatgtattgaatcgctttatcgagctcctgcaccatcttaaccgactgtgtatgagcactctcacctcggccattaaaaatcggcgtgcgtcctagccgctctagtccacgacgaatttccggctggaaaataacgataattccgattactgcccaagaaacaatttggtccacaatataagttaccgcatgcagttgcagtaagccggcaataattctaacaataaagataaagacgatcccttttgccagttgtactgctttggtaccacgaatcatcatgatcaaacggtaaactaaataccaaatgattaaaatatctaaagcaatggagaaattattccaagtaaacagattagaaatattaaaatgcattgattgctcctttcttctttaattataaccgccccaatttaccgtgcatacattttaaattctaaaaataggtcattatattcttgggtcttcttaggacctaaatctctaaagacctgtagattcttcaacgtactttgagtaggataaaactgccggtcatctctaacttttttcggcaataatttttgggctgcggtatttggggttgcatatccaacatattccgcattttgcgctgcatttttaggttcaagcataaaattaataaacttaagtgcagcttttttattttgtacagttttaggaataacaaaattatcaaaccacaaatttgatccttgcttaggcacaacataatgcaagtgaggattttgttccatcatttcataagcctcaccagaccaggtaacgccaattgctgcctcattttgcactaggtacatcttcatttcatctgaaataatcgccttaatattgggtcccagactattaagcttagtttgtgccaaatgtagtttaatactagatgtggtattcattgaatatcctaaagaaaccaatgccatccccattgcatccctagctgaatcaactagtaaaatttgcctgcgatactttttactccacaggtcattccaagtcttaattgcccctggcttgacgaatttatcattataaacaattcctagtgtcccccagaaatatggcacagaataatcattattttgatcaaatgacttatgtaaaaaactcttgccaatatatttcaaattaggaatttgcttttgatccaactgatcaagcaaatgagccttgcgcattttagttaccatatactcagaaggaatggtcaaatcatatgccgttccgccttgtttgattttggtatacatcgcttcattggaatcaaaggtctcatagacaacatgataacctgtctgcttttcaaacttttttattaactttggatctagatagtcgccccagttatagataatcaagttttgtttatttttcccggtagacgatttctccaaatgatgggataaaccccaaaggcctgcacaggcaattaaaatagctgcaattgccatcataatctttttcatttaactaggcctcccatcacacgatgatttttctttctgccctttttagtagtaataaaataatagattcctacaagcaacaagacaaaaatgaacattacggtacttaaagcattaatctcaagatcgattccttgtcgtgcccgagaataaatttcaactgaaagagttgaaaaaccattcccagtaacgaaaaaagttacggcaaaatcatctagtgaataggtcaacgccataaataaaccggaaaagatgcctggcataataactggaattaaaacatcactaaaaacctgccatgaattcgcccctaaatcacgtgctgcatcaataagcgacatatccatttcattaagtcgcggcaagaccatcaaaaccacaatcggaatagaaaaggcaatatgacttaacaatacagaaccaaaatttaagccaattcccaatgctgtaaaaaagatcaaaaaactagcaccaataattacatcaggtgacaccatcaagacattgtttaatgctaaggttgttttcttattagattcttttttcatcgcagcaattgcaattgcaccaaatgtcccaataattgttgctattaaactggacaacagcgctagtaggatagtttccaaaaatatcgctaataagcgattatcttgaaataaagtctgataatgagcccatgtaaagtgctcaaatttattcatgtttttaccactagaaaatgaaaagtaaatcaaataaaaaatgggtacatataataggatcaaagtaaaagcaagatagatcttagcgattaaatgtctgtttctcataaatctaccttctttcttctagcctttttgctagtaatcaacatgactaccaccatcagcgcgattaaaattactccaattgtggcccccatattccagttcattgtggtcataaaatactcttcgatagcagtccctaatgtgattacccgattgccgcagatcagccttgttaacataaataatgacaatgatgggataaagatggcctgaacgccgctttcaactcctggacgagaaagcggccataaaacatagcgaaaagtttgccatttactagcacccaaatcctcagaggcatgaatgactgcaggattaatctctttaatcgcattaaaaattggcaaaatcataaacggaatttcaatgtaagtcgccacaaaaataaaagcaaaatcagtaaacaaaatatttacgggaccaataccaaataaatgtaaaaatttatttactaaaccgtcattacctaaaatgccaataaatgcatatgctttaagcagcaaattaatccatgttggcaaaatgatcaataacagccacagctgctggtttttcattttaattaaaaaatacgctgccggatacgaaattaccaacgtcaacaaggtgatcaaaaatgcataccaaaatgagttaagcatcatttttaaaaaggtaccatttttaaaaaattcaacgtaatttctgagcgtgaatgcgttattactatcagtaaacgaataccagagaatcaataaaatcggcaaaatgacaaagagaataatccacagcagatatggaatcataaaaaacatctttttatttttcattttcatccgcctcatacttttctagtcgagcatcaaaatcgtgttggctttcatttaaccgcatgacgtgaatatcttctggatcaaaaaagagcccaacacgttgtcccaatttaactccattagtagaatggatcagccattcattttcattggcatcaattgccttaatctcaaagtgatcacctaaaaataattgcgtctgtgctgtaaccacaatcttcccatcttctggtttaacaatatccaagtcttcgggacgaataactacttcaaccttttcattaggcttcatcccaccatcggcacatttaaatttattattagcaaattccacttcgtaatcatgaatcattcgaccagataaaatattggagtcaccaataaaacgtgctacaaagtcattcactggctcatcgtaaattgctaccggattaccactttgttgaatctgcccatcatttaaaacaaaaatttcatcactcattgatagagcttcttcttgatcgtgcgtaacaaaaataaaggtaatgcctagctttttctgaattgcccgtaattcaaattgcatgtcttttcgtaaacgtttatccaaagcagatagcgactcatctaatagtaaaaccttaggttcattaacaattgcccgggcaatagctacacgctgctgctgtcctccactaagttccgaaatttcgcggttagcgtaaccgtctagacgaaccatatgcaaagcatctttaacagctggcttgatttcactcattggtcttttcttaattttcaagccaaacgccacattttgaaaaacatccaggtgtggaaacaaagcataattttgaaaaactgtattgatatgtctttttgaagcatcaaggtcagtaatatcattaccatcaaagaggacttgaccactagatggctgagtaaagccagcaataattcgcaaaattgtcgattttcccgagccactaggaccaagtagtgaataaaatttaccagattcaatagttaaatttatatcttttaatgctacaaacccatcatcatattttttggtgatgtgttttagtttgataatatccatttccatccctcacataaaaaacagctgcaagccttccagcctgtagcttgtctttgctaaaatattttacttttctttgccgataatcctaacttctgtgcgtaagtcaatgtcaaacttttctttaattaccttttggatcaaatgaattaaattcaaataatctgttgcagtagcaccgcctttattcacgataaaacctgcatgtttcattgaatcttgagcgccaccgatttgtttaccttgtaaaccagctttaataatcatcggaccaacaaagtgcccagtaggccgcttaaagacactgccacaagatggatattcaagtggctgcttataacgacgtaaagcatttaaataatgcatatgatctaagatctctaacttatcgcctgacttgagtgcaaaagtggcgcttaatacaatatcgccattttcttgaactaatgaatgccggtaagaaaagttcatttctgcgtttgaatatgttttaaattctcctgctctggttaaaacattaacgctttgcactacttcttgcatctcaccgccataggcaccagcattcataaaaataccaccgccaatactaccaggaattccagcagcaaattccattccgctcaaaccatgatgagcagccgcaaaagctgtatcgataatccgtgcaccagcatcagctgtaacttgattatcttctactttaatctcttttaattcagtcaaaataattactaacccatcaattccgccgtcacggatgattaaatttgaggcattgccaataattgttaatggaatttcattttcacgtgtgacttttactaattgttctacttcatcagtcgtcttaggaaaggccaaatattcagctggtccacctgtcttagtaaaagtatatctgcttaatgggatttgctctttaatatcaatccctttttctttcaaatcaagtaattccacgctgttgcctccttaaagtttcttgttttattttaccgcataaaggcgttagcttcattaatattaatgatatacttttttaaaaggagaattttatgaattttattgcaatggactttgaaacagccaaccattatccagaaagtgcctgttcacttgctttggtaatggtgagaaataataaaattgttgatcgcttttatacagtaattaatcctcaaatgccatttgacgcgcgaaatattcaagtacatcaaattacagctgaggacgttaaaaacgctccaacaatggcagaggtctggccccacattaaagaattgtatcaaccaggaatgcttgtagccgcacataacgctcgctttgatactaatgtcatgcggcaaagcctggcacgttacggtattgaggagccccactatttggtcattgacactttagctagcagtaaattactcgaaccagaactgcctgaccacaaattagacacagtttctgaggccttaaacgttgaattgtggcaccaccataacgcattaagtgatagtgaagcatgtgctgggattttaatcaagcaagaagagcaatttggtgatgaagcaatcaaaaatttggtttatcagatatgaaaaatctctaggaattttgatcctagagatttttgctttacttattaaattcagttaacgcagctttgacccattcttcattgcgcttaccatgaggagtaaattcaacaacccgtttagttgaatcccaactatcgtccactctggtaatcgtaagttgcaaatactcatctggcaaatcattcattactagttgtggccattcaattaccactaaacctggttctgctaaatagccctccaaatcaatcgaggataaatcatcattttccaaacgataaaagtccatatgaaagagcggcaacttagcttctcgatattcacgcacaatggtgaatgtaggactcttaacaggccgatgtatgcctaatgctcgccctaatccttgagtcatggttgtcttgcctgcacccaaatcaccatttaatagtaataaatcgtagggctgggccgttttggctagggatgcacctaatttctgcattccatcagcagaattaatttctaactttgtcattacttttcatcctttgctaaagcttgtgcggcagtaacaattgctaaatcataaatatcttgttcactgcagcctcgagataggtcattcactggagctgctaaaccttgcaaaattggaccaacagcagtgaagccacctaatctttgaaccatcttataaccgatattgcctgattgtaattctgggaaaacaaagacattcgcatgtccagctacctttgagtttggagccttcttttcactaactgcaggtacaaaagcggcatcaaattgcaattcaccatcagctggaatttctggatgatccttttggaacatagctgctgcatcatgtaccttatcaaccattggtccttcggctgaacccttagttgaaaagctcaaaaatgcgaccttaggatcaatttcggccatcttggcagtcagagcagattgatagccaatttcagctaaagtttcttcatcaggattaatgttgatggcacagtcggcaaaaatgtaacgctcatcgcccttttccattacgaaagcgccggatactcgatgcatccccttagctgcatgaattaattgtaaagctggcaaaacagtgttagccgttgagtgagcagcaccggaaaccataccgtctgcttttcccatcttcaccaacatggtaccaaagtaattaccttgggctaacttgagctttgcttcagcaatactggtatcttttcgtctagctttaacaaattccgctgccatttgatcaagttcatcataatgattgaggtcatagatcttaacaccagctaagtctaaattattttctttaactaacttagcaatctcatctggatttccaattaaaattggttcgataatgccatcttttttcaaattagctatggcagtaagaattcttaaatcatcgccttctggaaaaacaattcttttcttatcttttgctgcttcaacttgttttttgaataatgaaaatacgctcattttttacctcttatgctaaatcagatttacttatcgtttctggcaattgccagtcaatcggcgtttcatcaaagttcttcaatgccatattacaccgcgaaaacggtcgcgagccaaagaaccctcgatcagccgaaaatggacttggatgtgatgatttaatgataaaattcttactttgatcaattaatggaatcttgttttgagcaaatcgaccccacaaaataaagacgacttttccacgctcactcagagccttaattgcagtatcagtcacatcttcccaacctttgccttggtgaccgttagcatgcccatacggtaccgtcaaaaccgcattcagcaaaagcacaccttgatcggcccacttttttaagtaaccgtgattaacaggccgagctccgacatcatcatagagttccttatagatatttttaagtgatggcggcaaagttgtacctggcatgacggaaaaactcattccattagcttgaccaggattatgatatggatcttgacccaaaattaccactttagttttagcaaacggtgttaatttaaaagccgtaaaaatatgatacatatcaggataaatttgtttagtagaatattcttcttttaaaaaattatgcaattcgtgatatttctcacttgcaaaaacaggatccaatacttgatcccaatcgttgccaattaattctttagccaagtcttacaccctcttttcttctcctctttatggtatcattaatttaatactaaatgggagagaaattatgatcaaattagttgcttgtgatcttgacggcacgttgtttaattcagagatggctgtttctgctgctaatgcaaaagctgtgaaaaatgcacaaagtagcggcattgaatttttaattgcgactggccgggccccacgcgaatcacgttcagttctcaaagatgctgatttgcataccagttttatcaatcttaatggtgccctggtttttgacgaaaatgagcaattaatgatcaaacacagtattcccaaggcaaaagcacaacagctagtgcatttactacatcgatcaggcttttactttgaaattttaactgccaatcaggtttatagtgaaaatctagatcaacgtatttcaaatgtagctcatttaatggtagatctaaatcctctacttgattttcgtcaagctgtagcaatttctgctggtaataagactattatgaatatgaaacaaatccacagtttcgataatttattgcaagatcctaaaatagaagtaatgaaaattattgcttttgactctcggggacatgaagcttttaccgatatcaaaaaagaaatcgctacaatgggcgatctagtagtaacttcaagttcatcttctaatattgaaatcaatgagcaacatgctcaaaaaggtcttgccttacttgattatgccaagttaaaaggtatcgagcctgaggaaatcgctgcaatcggtgataatttaaatgatgagagtatgatccgagcagcaggtactggcgttgcgatgggtaatgcgattccagctattaagaaaatagctcaggtagtcaccaagcgaaacaatgaagatggagtagcttatattttaaataaatttattgcagataataacaatatttaaagttatgaggtgagtaagtatgcgattttggctagaacttaatcaggaaaaggattacggtcaaattcctgtgcttaatcaaaatggaaaagctgaattttttattcaaggcaatcttgataatccaaaccacactttatatctaaataatttccgtaaacaggaagtgggacgtctgttttctgatggtgcgggcctaattgcttcgttcacaattgatgtcgtcaaccactctttagtaggcgtaaaaaagttaaacacacctactgcaaacatattctatttgacccaattaaagtatattgttacaggtagtattaaacgtggtacttatacttttcgttctggaatcaagagtgtagcaagtgtccaaacaatcatgggagatcgcggaggcgttttaatttgtgatattactaagcctgaagacgtcccctttattcttttgacatccgttctatttacacaatggcatgttacgcctttgaaactgcctagttttccgccaattggatttgaggtaaatccaaattaaacaaaaaagcagtcatgaaaattttcataactgctcttctagaaagtgatatagatatagatgtatcttctgccataaagtttatatttattaagtaataaggaattattaggcagagactgaataatgaaagttaaatctaatttgattcaacctccatagcttattatacttcgttcagccaaaaatacaagggctagatgttattattttactttaaagatagctaaataatgcatttagagctagcttatagcttaataatttgttatttaacttagtacatctatttttctaaacaagacaactttaatttctacgtaaattgcaataataaattgaacacttttaatcaagctgcttgatagattagatctaattctctttcaaagatttcatctggtgtatgatatgccaatatctttcttggtaaagagttgcaccaggtttcaatgtctatgatgtcttgtagtgaataattgtctattgcctctcccttaggaataaatctgcgaatgagtccattatgtctttcaacggttcccttgtcacaagatgtataaggatgagcatagtaaactaaagtatttgatacgtcttctaagcttgaaagatctgcaaactctgagccattatcagtggtaatggttttaaaaatatcattccaatgttcgctgtattgcctttggagttctttaaaggcctgcatgacactgacagaagtcttgtcaggaatacgaagaattaagaactcacgactcatacgttcagataaggttagcagcacctcatcatctttgctcttatgtccgagaactaaatcgcattcccaatggccaaactcattacgtttattgatttctttaggacgttcttcaatgcttctgccaagttttttcttatttctgcgaatacgatgaagcttggtattgcgtttaagcttctctggcaagtcgtaattatgtatatctaatagaccttggtcgacataattgtaaagagtcttagtacagacaacatctctgctgctaaatgcgccaacagcggtggcgcgattactgcacacatcaagcgaccagccgtctttaaagaaatgtttgtggacatagcgcatgaattgagttttcctgagaaagtctgatttacgtccacaatttttacgatgagcttgatatgcatcatgcccttgagtagccttatatcttttgactttgccatgatacagttctacagtaccgcgcttaacctcataactgatagtagaaggggaacagtttaattcacgggcaatggcacgcaaagaatagccatctttcaaacgcaattgaataataactctttcctcgaatgataaatgcttgcctttaatgtgatgattcatggtagaatgtaaagagtccattttgacctcgtttctaaatgttgtgtggtaactacattctatcaaacaggtccgaatggactttttattttttattaagtgttcaatttaattttacaatcagcgactttaatttctattaaaaaatatagtgaaatgatcaagtgatttatcaatggcttgatcatttttatttactttatcaacgaacttgtttttagctatcaaactatataaaaaagagccaaatctaatgatttgaccctaaaaattctagattattaatctaaattattttttatgaattagtcttggtagtttaccaattctaagaatgattctggtactaatgaagcaccaccaaccaagccaccgtcaatatcaggcttagccattaattccttaacgttagctggttttacagaaccaccgtattgaatacgaacgttttctgcagtttcttcgttgtacaagtccttaacagtttcacgaatagtcttgcacatttcttcagcttgatctgatgaagcagtcttaccagtaccgatagcccagattggttcgtaggcaataacaagtgaagatacttgttcagcagttaagccgtctaaagcagccttaatttgagcaactacccagtcttcttgcttgttagcttcacgagtttcaagtgattcaccacagcaaatgattggcttcaagccattagcaaagattgccttagccttcttgttaatgtcttcgtcagtttcgtggaagtaaccacgacgttctgagtgaccaataattacgtagtccatacccatttctttcaagaccttaggtgaagtttcaccagtgtaagcaccttcgtcttcaaagtaacagttttctgcaccgatatgtaagtttgagccttcagcagcttttctcaaagcgtcaaggtcaactgcaggtgcacaaataagtgattcaaccttacttgggtctggtaacttatccttaacagcgttaacgaattcagtagtttgttctggattcatatgtaacttccagttaccagcaataattggtgtacgactcattaatctattgtcctttccttactattacttgtctgaaacgcaagcgatacctggcaattccttaccttcaaggtagttaagtgaagcaccaccaccggtagaaatgtgggtaatcttaggagcaatgcctaattgcttagcagcagcagttgagtcaccaccaccgatgatagtagttgcatccttaaggtctgccaatgcacgaccaacttccaaagtaccttcagcgaagttaggcatttcgaatgcacccattgggccgttccaaacaacagtcttagcatccttcaagatttccttgaacttttcaacagtcttaggaccgatgtcaagacccatcatgttgtcaggaatatcatcaccaacaacttcacgtgaagcatcatttgagaattcagttgcggctacgttatctacaggaagaacgatcttgtcgccagccttagcaagtaattccttagcaaggtctaccttgtcagcttcaaataatgatttaccaatgctgtggccttgagctgctaagaatgtgtaagccataccaccaccgattaaaatatggtctgacttaggaattaagttttcgataacaccaatcttgtctgaaaccttagcaccaccaagaatagttacgaatgggtgtactgggttttcaacagcatcacctaagaacttgatttccttttcaagcaagtaaccagctgctgcaggcttgccagcttccttcatagcagttgcgataccaacgtttgaagcgtgacttctgtgagcagtaccaaatgcatcatttacaaacatgtcgccaagacttgcccagtattcgccaagcttaggatcgttacctgattcacgcttaccaaagtcgttgtcgatgtcttggaatctagtgttttcaagaacgataacatctccatccttcatgttgttgatagcgtcttcaacttctttaccttcgtttgatggtacaaaagttacaggcttcttaagaagttcacttaaacgttcagcaactggctttaatgataattccttcttgtcagcatctgacttaacacgacctaagtggctaagtaagatagccttgccaccgtgttcaatgatgtacttaatagttggaagtgcagcaacgatacggttgtcgtcaccaataacgccatccttaattggaacgttaaagtctacacgtactaagacctttttgcctttaacatcaagatcgtcaacgattaatttagccattataatcctccgattattttgatattttttcttcaaaaaaaggcggaaggaagaatctccctccgccttctcaattaccacttaactatataatcagttaattaaaattaatgattaaagagttgcaaagtgtaataaagtacgtaccatttggcaagtgaatgagtattcgttgtcgtaccaagcaacagtcttaactaattgcttgtcacctgcagtggttaccatagtttgagttgggtcaaagattgaaccagcagtcatgttaagaacatcgctagaaacaatgtggtcaccgttgtaagcaaatgatgggctttcgtacttcttcatagcttcgttaacttcgtcagcagtaaccttcttgctcaagattgataccaattcagtttctgaaccatctggaactggaacacgttgtgcgtgaccgttcatcttaccgttcaagttaggcaataccaagccgatagccttagctgaaccagtagtatgaggaatgatgttttcagcagcagcacgagcgtcttgttccttaccactacgtgaaggaccatccaaagtcatttgagtaccagtgtatgcgtggatagtagtcatagtagcaacttcgataccgaattccttgtccaaagcgttagccattggtgcaagtgagttagtagtacatgaagcagctgaaacaatcttgtcatcagcagtcaaagtgtcttcgtttactgagtaaacgatagtcttcaagtcgttaccagctggagctgagatcaatacacgcttagcacctgcatcgatgtgagcttgtgacttagccttgctagtgtagaaaccagtacattcaagaacgaagtcaacaccatcgttcttaacccatggaatgttttgtgcttgtggttctgcgtatacgtggtaactcttaccgtcaactacgattgaatcttcagttgatgaaacttcgtggttgaaagtaccatgagtagtgtcgtacttaagcaagtaagcaagcattgctggagtagtcaagtcgttgatagcaacaacttcaatgtcctttgacttttcgccaaggtccataatacgacggaatgctaaacgaccgatacggccgaaaccgttaataccaattttaactgtcataacctaaagtcctccttaagaactataaacaacatttattttaaacgggatttcatttcccctttaaaatcatatttgaggcgccctcatcagtgattagccaggtttgatgaggcgcattaggcatataagctttaattgcttgagcctttcgggcaccacaagcaaaagcaaatatgtggggtattttgtataggttctcgaactgcaatccaacctgggtgatgcggtcaacaaccttgccatgttcatcgaagaaacacccgaaacattcggtgacggctctcttctcacgaagttcagatagcttaattgaattatagcctctgcgctgtgccatttcttgagctaacccaataccatgaatcacagcatcactttgagaaatgtcttgcagaacatctgcgatcgaggactcacgaatcaaagatttgtaagcatcatctgaaacctgctcaggtaaatataatgtcttataagtacctgaagtcttagcagccatttcttggacgattgtattactttgcgtctctacattttcgcccaaagctcctcgacctggaacaaattccaactggcgattgttagctaaatctggtgataaatacttagcagatctagctaacgccgctccacctagaattgtaactattgaatggcctaaaggcaagagtaaattcaaagctgaacttaatttttctcccatctcctcatatactcggtcttggaaatccgcattaccagggacgatcaatgttctttcaatccctaattttttggctaatgctacttccgtttcaccggcattaaagaggcgatcaagcaatggtcctgcatcttttaatgttttctcacccttttcagttaaaaacatcccaaaactttttgtttcaatcaatcctaattgacataagtactcagtctcagttctgatgtttctctctgaaagccctaaatgctgagcaacactccgacgtccaattggcgcatgtagcgaaatctgctcaaggacaagatacctttgtcgaagaatctttaagacgtcgggaacgagcgcttcgagcaaagaaaagtccgaatccatcgttccctcctttccatgggacatctatcgaccacctacgtgtcgttttgtgtcccagaatgcttaaaaatataagagaaacgtacttttcattcaattcatacatttcccaatcgacactgttagtataacaatgtatttttcgtaattcaagaaaaagatacacgattttaaaaaagtcgtaaatcgagtaaaatcatttttatttcattattttttttgatatactaccacttgtgaatcatctgggcccttagtgtaatggatcgcacataagattccggttcttagaatctgggttcgactcccagggggcccatataactacatgttgaagactaccgccatctcggtattcttctttttttataccaaaaaagcattcctcacggaatgcctttttcaatatcacaattatttagtgcttgtagtcatcaactcagcacgttgtgctaactcagtgtacaaagttgagcctgaaacagataaaccttcaatttcacggcgagtgttgaaatgatggctacccttataagtaccatttgctgctacacggaagatgtagtcgttaaaaccaatatagaattgattgtggttgctgtcataagcaaaaccttgaactggtgaaccagttacgaaattactttgagtagcaccgatttcttctggagtccaagtgtcaccatttctagttaacttccagtattcatattggtgacgaccaccattgtggaacaatgcatacatagtgttgtcgccaacaaaggttgcattatggaagtaacgaggatatgcactgctgccgttccaggtcttaacagtccagattttgttaatcttcatatcactctttcttacttgcataatttcttctgaagctgctgaattagcagtcttattgttattagccaaaacataaatgtagcttgaagaagagccaagtgattgaccatgacctagcttaatgtatggtgaaactttaatattgtttgcgtagcttctaaaagtgctccatcccatagtagttaagttttgagcagcatatttactcttaattgcattcaaattgtaagaaacaagatgtcctcttgagtcgctactgctagtgtacatagaagctgtaaaaataccatcattaacagtaataccttcaggaattaccccaacttgtcccattgcatcagcagcttgaccatagcctaagctgacaaaacgtggttggaacaaacgagtgcgcaaagtcatgccgttacctgaatagctatttgagctagtttctgaacgataaccgtgtgcctgattccaatttcttgatgatccctttgagccaccattccaagtatgaactgccttaggaccactcttaacagaagcacctgcactagtaattccttcatttgcatctgaacgaacagttacattaacgcttgcctttgccctgccatatgaataatctaccttagtagtaccggcacggcttgaattaacagagctatgtgaaacattaaccttatccggattaattgcagtaccttgtccatctgttgcatagttaattgcatccctagttggaaaactgtagttgctgttgtgaactaagctaacatcttgagctactgaaatttggtttctagcaaaaaagttttgacttacccaacctacattgcgtccatcgacaataatgtaccagaagttacctttcttggtagaaacatacttcttagattgaatttgaccatgcttaaagtacttggtatttgaaaatgcacctgatggtccttttttagatacattatgataaatagcgtaattaccattgccagcaatcttagtaactgccttgctgtagcttttggcatctaccttgctttgactaatggcaaaaacaccaccaactaatgcagcactggccacaaaagttaataacatctttttcccttttaacatccttattaatcctcccatatgaaaaaatcacgttcattttagcacaaatttatcaaatgaaacatctaattattaaaaaatttcctgaacaacaagactttgaaaacgcttctgttatataattaaaaagttcacataaatatataaatagtaatagggagaaattttatggtcgaatcacaaaataattccaaaaagatgatgtggaccaccctagcaatgatggccttctctaccgtgtggggctttggtaacgttgttaatgggtacgtctactttgacgggacaaaggttgtctttagctggatcgtcatgttccttctctactttgttccttatgccttaatggttggtgaacttggagctaccttcaagaatgctgaaggtggggtttcctcttgggtaaatgccactatgggcgcaaaatgggcctactacgcaggttggacctactgggcttgccacgttgtttatatttccagtaaaggtactggtggtttaagagcgatggcctggggtatcttcggaaatacaaaatggtatgatggcttacctaccgcttggacacaatttgctacattagtagtcttcttgcttttctgttgggttgcaagtcgtggtattccagtattgaaaggcctagcaacaattgctggttcttcaatgtttatcatgtcaatcttattcatcattatgatgtttgccgcaccagctattaatccttctgctggtttccacagtattgactttaactggaagaatttgatgccaaccttcaacgtaaaatactttacttctctttcaatcctagtatttgccgttggtggttgtgaaaagatctccccttatgttaataaggttaaggatccttccaaaaacttccctaaggctatgatggctttagcaatcatggttatggtatctgctattttaggtacttttgccatggcattaatgtttgaccctaaggtggttaatgccaaccttaacgaatacatctctaatggtgcttacatggcatttgacaagctgggcgaatattaccatgttggcggcttgttcatgtacatctattcatggtgtaacgtaatcggtcaattctcaacattagtaatcagtatcgatgcaccacttagaatgcttttgggtagtaaagaagctaaagaatatattccaaagggcttattaaaactcaacaagcatggtgcttacatcaacggtatctggatggttgttgtcctctctggtggcttaattgctattcaagctttagtaccaaatgctcaagctgttatggcacaattagttaaattaaattcaactactatgccacttcgttacctttgggtatttgcggcatatgttgctttaagaaaacagcagcaaaagttcaacactacttatcaaatgactaaacatcaaggcttagcctatactgccggtatttggtgttttgtagttactgctgcatgttgtatcttgggtatttactcaccagatccatttaccttattccttaatatcttgacgccaatcgtcttgattgcattaggtttaatcttgccaggaattaagaaatatcaagaagctaaggcaaaataagatttaaataaagaatgttaaaaaggaagcaatttcaaaagactgcttcctttttagtgtatatttttatttattagcccaagcatttaccaatgccttgtacttggcaacgctaattccttcacctttactgcttcctaaatatgaatcagcatttccataaccagtattgcttacattggcaaagcccattactctataatttctgttaatcaaattcaagtagtgtcctgccattttatagccgttcgtgccctttacggccgcatcataagttgccgtccaagttggactatacttcgccggcttcaacgaatgattcttttttacatcataattccaacttttcttttcagagagccaagtatcaaccggatctaaacccacactttgagtagcgatgttttccaaaccaatcgacttgaaataatgagtatgctttaagccaccacgtttttgatagtcagcatttaacattgaggctgctgtcaaaagtggtgacacctttaatgaccgaaccccttcacttctacgtgctctattgacactattcaaataaggcaatacagctttaatattctttgcactagttgcatcatcatttgaatgcaagtcaacgtattcattgtaccaacttgccttaggctttttacctaagcgacctgttttcaataatttcactgctgatctagcggaactcctttgccctttagtcaaagatttgtttttagatagatatgtcataaaatcaacggcatttttggctgccttaactggcttggaattcaatgcagttaatgacaaggtcaccatcacagcagaagcacctgcaattaaaaatcgtttcttcattctttttctcccatattaatatatgtgaactacgatttaattgtagcacatacactaatggaagattttccttttaaattgcattattattcatctttaccattccgctttttaatctgacgattaattttttgaatatctttttcttgcgtcaatctaatcacaatccaaattatgatatatacaaaaatgaagatacctaaagtttgccaatctataagccaatgattaaaaagcatcataatagaaaacaacgtaaatgtaccaattaaatgtaacaacaacgcaactaaatatgacaggttagtataaaaaagaaaactcaattccccaatcaaaccactacaaatgaaaacaacaattacgctcattaatgggatattaattgcacctacactatttgatactattcctaaaataagcaagcaagtaattgcaccaaatcccattccagttacacaaaaatctaaaactttatgccaaattttcattttataatcccagtttcttttctaatttaggtaaatatcttcttgaaacatcagtcttctgtttaaaagctagttttgcaatcatattgcccgtaaatcctgcctcgagtgcttcaagataattcaaattaataatcccatgttttgatacctgtacaaagtcattatttaatttctctagaacttgatataagcgacctgtagttttaatgacagcacttttggtataaaaagttaattctgttttttcaacctcgactttgataatttcttcaattttaatagttaaaatccgatcttcagtttttaccggcagaattgaatctacctttttaccaaaatcttgaatataagccaataaattttttacttctgctgtttcctctaaagaaattactttgatcttaatttgatcttttttcaaattagaatctgactgaaattctacattcacgtgttaattcttctttctaccaagcatgactgcgagacatattactataactgtcaataagagtgacatagctattattaccaatgcattatccccgttagttaattgatgagacccaaatttaaaatgaatccctaaatactcaatcaatttttgacgcatttcatctggaacatcttcctgacttaatttatttaagagcaagcttctaaaacttgccgcttcataactacttggaaacaattttactatattttgcgcagtttttgataaagttccataaggcatgtaagttgcaaccataaatccagctgctgctccaattaccgccgacaaacgactaaacgttgttgaagaattgataaataaaacgataactaagtttaataaagttgcgccaattgcacctaataacataaaacctaatgctggcaaatatacagtcgattgaatattcaccttatcaaccactgaaaaataaattgccatcaccaaaaaggtaataacctgcatcaagaaacttattattaatgctgaagctacgtaggccatgcattcactaattggagttaaattcgttagcttcatatcatcaattgctcggctttccctatccttcaccatttgaccaagtgcttgaaacgaagtagtaatgcctgcaattgaaacaataccgccaagcatccagaggtccaataattgttttgcatgactaacgttttgccaagaatcaacaagattttgttgtaaaaatccaatataaatcacaaatgaaattagtgcaccaaaacatgacattactacacctggtttattagcaaaataaattttgatatttctcttcattaaggcgaacattattgaagctcctttccagcaatcttgataaatgcatcatcaattgacccttttcgatattcaaatgtatcaatcttatcttcaaacttatgtaaaaggtctatgacctgattactattaagcccatcgatttcaatttgatcatctgacttagaaatttgtttaaaattagtagaaaaagtttgcccttgttttaggcaaattagcagccgactgggtgcatacatctctttaatttcttctgcagagccttctgctaagacattgccattttccaaaatatacatctgatcagcattttcagcttcctctaaatagtgtgttgtcaagaaaatagtcaacccctgttctttttgaagcttttgcaataagtcccagataacaattctcgtttgtaaatctaaccccgtagttggttcatctaaaaataagatatctggatgatcaattaacgctctagcaatatccactcttcttttttgtccaccagacaaagtaccgtatttttgattgaggaaacttctaataccaatcaacccaatcaatttttctaaccactctttagaaaaagttttgtacatccttgcccttaaatatagattctctttgacagtcaatacatcatctaaaacactattctgaaagactactccgatttttagatccttagcatacgtgatagtgccactagttggtttcaataggccaattagtatgttgatagtagtagatttacctgcaccattcgtacctaaataagctaccaactgtccacgattaatcttcaaattgaccttgttcaaggctaacttcttaccatattttttagttagattaaaagtttcaattaacataaaaagacttcctttctgaattcataatcagaatacagaaaagaagcctttttgtacttaaacctcaaataagtggttcatttttacacacaaggtgcaaaatagctaaatcaaaattgcattattcatctatcttaacgtattgtcctttttcatctacaacacctttgaaatggtgcatgctgccatcttcggcctgaaattcacctaagtcaatttccccatagccctttgtagaatcagtaaccttaacatcatcaaaagtttctctgaaaaattgatgaacaattctactcttcaaccgtatatcctttgaatgctcaaaggctgcagacaacgtaaagccctcatctaattgttccttgataaaaacaattagatacaaggtcgctaaattatagcggcgcacaccactttgatcatctgaaatcggcttaatgtagcccttagtttcccaatagcgcaattgcctttgcgaaacaccagtcaatttactaacttcaccgattccaatttctaaattttgaaaaatgtcatgcataatttttttagatttcatcctgataccaccttacagtatagttatattttatatattgttgttatcttttgcaacacttgtgttaatttatctaacttatttgtaagattatttgacaatggcaaattttaagcctatagtttttatagttaacttttataagagaaaggaatattacatgaacaagcaaccaacggatattcatggaaaagcttataatcgaaacctactagttttagttttaattataggttctttctgtactgtattaaacggaacactgctttcaacagcgcttccttcaattatgcgttcatttaacatcagcaccgcaactgctgaatggctttcaacagcctttctgttagttaatggtgttatgatcccaatttctgcatggctaatcaatcgcttcggttcaagaaaaatgtatttgtcagccatgtcaatcttctttattggaacagtgatcgccgcaattgcacccaattttggcaccctgcttgctggaagaatcattcagggattaggcgtcggcgttactatgccacttttacaaacaattatgctttccatcttcccagctaataaacgtggtgcagcaatgggaactgtcgggattgttattggcttagcaccggcaattggaccaacattatctggttggattgttgataacctttcttggcgttatcttttcagcatcattgccccaattgcgggaatagtaattatcttagctttctttttaattaaagatgttttaccaactaagaaagaaaaaattgatgtttggtcagtaacaacctctactctaggcttcggaagtctgttgtatggtttttcagaagctggtaacaaaggctggaccaatcccgagattttaggatttattggatttggaattatatttgtaatcctattcggtatccgccaattgaaaatggatgacccatttttggacattaccgtttttaaacactttgaattttcactggcagctgccttaagtggtatcaccaacttagcgatggtcggcattgaaatggttttaccattatatattcaaaatttgcgtggcgtttctgccttccattcaggtttaatgttactacctggtgcattgatgattggtattatgtcgccaattactggccgtttattcgacaaatatggtgcacgtaaaattgcaattactggtatgactttgttgaccattgggactattccattcgtctttttaactgaacaaagttcatacacgatgattatcattctttacgcaatcagaatggtcggtgtagctttggtaatgatgaatgttactacatctggtatgaattctttaccattaaacaagatttctcacggtactgctgttaacaacactttcagacaggtattaagttcaattggtactgcaattttggtatctgttttaactacaactaccaataataatatgcctggtaaaagtttacttcatgcactgccacttgaatacaagactagagcaatcagtgcaactttagacggttttcatgcttcatttgcaatgagtatcctcttctcattaatcgcattagttcttgcattcttcttaaagaagggcaatcgagcacgtgaacatcaagaaaaggtggatggttaaatgatacttttaattctaatcgtagctgcaattatgtttatttactttaatatcatccctggaaaaaggcatacttctattgcatggctatcattaatcgtaacaattctttgtgttgttggcattgtagaacatgattataatcactggggaatgaaaactgaaacaacttcaagcactaatactctagtttccagtgctactcctcgcctgccaattttgctttatcagcctttaggtaatggaactgaaaaagtttacctttataaaactggtcaacttcaaaagaagccaaaatctattaaattagataaagtatcgacaaaagtaaaacgaagcagccaaccaaaagtaacgattaagactactcgctacacctatagcaatacctttaatcaaataatgtttggcgtctttggtcatgacaaggagttaaaacacagagaatatattttttctattccctccaactggaaagtaatgtcagttaacgatgccaagcagttgcaaaaacaaatgatgaaaaaacagcagtttttaaaacaaaaatcagcccaataaaataatgaagatcaaactttgatcatgatatgaaccccgaaattcggacatgaatttcggggtttttatttatggctaaattatctaaacatgacaaaattgatatttacaatagctagaaaaattaaattcattttaactcaaattttaccatatgatttaagttaacttaaatcacctttacaaacgcttatgaaatataatttaactaaatctaaatgtagaaaattatttttatcatactgcctatttcaattgcatcctatcattaaagtaatttttataagccaaatagccactaatcacggctccaaggccagtggcagaaagcaacataaatgtaatcataatctgatacttaattgcataaatgggatttacaccagcaaaaattaagccggacatcattcctggcaaatttactaatcctacagttttagccgaatctatcgtaggctgcatcgcagtcttaatgctccttcttaaaattggcatcgatgcagttttaatatcactacccaaagccaacttttctaaaacttgttgatgcagatcattaaagctatcattcaacgctttatagcataagccaactgccaccatttcatttccagcaatcatccccgtaatgggaatgacctgcatagggactggtttaattacgccagaaaaaatcagaattcctaatgtcacgtaagtccctaccgcttcggctattatcgaattccaaatattccgccccggattaggatcacgctgattagcattccaagatgcattaaaaattatcacaatagttgaaaccaaagttagccacaaggcattaacatgaaaaataaacttcaaaacgtagccaattacgactaactgaattatcgccctaatcacgctaattaaaatatccttggttagtcctaatttttctttcgcagaaattccaatggaaactaacaccagtgcaaaagctaatactaacgaccagttgctaactacaacatttttcattcgattattccgcctttttttactcttaaaatattacttgcttcatcaatttcactttgatcatgtgtaacttgaataattgtcacgcctttctcagaaacatccttaatcaaattatgtacaatatctttactttgattatcaagcccggtagttacttcatctaagagcaatatctttggtaaaaatattatgtttcgaattaacgcaactctttgcttttcaccacctgataaagcagtaatctttttatctaaaaaatcagcagagagatcaacttgattaagtaaatcagctatttgcttgtcatttacatctacttttctaatttcatacgggaaaatcaaattatctcttactgtttgcccaaataaagacggctgctgaaaacaatatgaaacttctctacgatattgaactggatttaaggagctaatgtttttttcttgatatagaatatcgcctgaattagcactaattaaatttgcaatcaatcgtaaaatcgtactttttcctgcacctgatgggccaattaaggttagaaaatcgcctttattaaccttaaatgatacatcttgcaatatttgttttttatctgcactatattggatatgttttaattctaatattttcattcttttgcctaactaaataacgagactgtaaaatagtttgtgtaaggatgaatgattccttaaatttatttctttaaacattagaaaaaggagttcctttctcgtatgattggtttgaacaaaaaaacacatacagaaagaagaactccttcatgaatgattttaccaaagattttgctcaagctctattcaatccagacaaaataaatgatttattgcgcaaagagctacaacaggctgttaataacttgttagaagctgaattgaccgcctttctgggctatgatccctatgccagaaatggctggaatactggcaactctagaaatggtgcttatttccgcaaagttgatacgcaatttggcccaattgaagtgcaagtgccccgggatcgcaacggtcaatttcatcagcacacgctgcctgactacaagcagcactcggatatcttggaaagcatgattatcaagctttactccaagggcgtgaccaccagggaaatagccgatctaattgaaaagatgtatggcagccattacagtccagctcaggtatcaaatatttccaagcagatgattccaaaggttgaggcttaccacaaacgcaagctaagcgacaagtttttctgcgtctatttggatgcgacataccttcctttgcgccgagaaacatttgagcgtgaagcagtctatattgccattggcatcaagcctaatgggcacaaggaggtcattgactactgcattgcacctagcgagaacattgaagtctggacagatatgcttcaaaacatgaaatcccgaggcttaaagcaagttgagctttttctttctgatggtgttgttggcatgaaaacagccttggccaggacttatcctaaagctcattttcaacgctgtttggttcatgtcatgcgcaatatctgcgctaaagtacgcgtcgacgatcgtgaaaagatcatgaacgaattcaaacaggtgcatcaacagacaaacaaagaagaagccacagctgtcctgcatgacttctataccaaatggggcaaggtttacagtcatgttatcagaagcttgaaagacatagaaccagatctgctggtcttttataactatcccaagcagatcagagcttcaatttattcgactaacatgattgaatcatttaacaatgtgatcaagcgcaaagctaagcctaaggcagagtttccaactgaacagtcgcttgatgcttttattggcattcaggcaatgagctacaatgaccgttatttcaatcgaattcataaaggctttggtcaggttcaggacaccttagaatcctactttgattaaataaataattaaaaaatcaatttacgagaaagatctatttacacaaaagatttgacagtttctaaataactcatttttctaattatacaactaaaaaaataaaggaaatccaatattttcattgaatttcctttatttaaattaatatcgataatgattacttagtcaacttttgtttactttcaagtaattcagcacgttgagctaagttcatgtataacttgttgttgtaggttgcgataccttcaatttcacgaccagtgtggtattggtaagtatccttaacttcaccatcagttgcaatcttagcaattacgtcattgaatgcaaggtagaagttattgttcttggcatcataagtaaacccttgagtgtatgtgtttgctacaatgccacccttagttgcacctaccatagttggataccagttatcgcctttgcggttgaattcccagtattcagtttggtctttttctttattataaagagttgtgtaaagcttgtgatcatttacaacaacaccattattgaagtaacgaccgtctgaatcactaccgttccagcatttaatagtccaaatcttgttaatgcacatatcgctcttccgaatttggattaactcttcagacatattgctcttgtatgaaaccttattattgttatttagaacgtaaatgtatttatcagttgagcccattgcttgaccgtgaccaattggaatatatggactaactttaatgttcttaacgtaagaattgaacttcttttggctcatatcaagtaagtattgtccgttaaatgcattggttaaatggttaagattatatcctacaatatgaccattgctaatcagggtactacttaataaactagtgtacaaccagccatttgacatggtaattccttcaggaatatgacctacacggttaatatagtcatcatttttaatgtcacggtaaacacttaataaaactggttggaagaagcgagtagtgaaatctaattttccgctttcactatcataagcatgcttattcttatcaggagtaaaatcagtcttagttacatagttagcagaacttccatagtaagtcttccaggatttcaaatcgccgttaaatggcttagcttggacgctatcagcatcagcaattccttccttagtactctttctgacagttaccttaacagttgcctttgctttaccatagctatatttaacattataggtacctggagttgagcaatcgattgcatcttctgaaatcttaatatctgctgtatcaattacagtacccatataattggttacataacttactgcatcagttggatcaaaatcgtagtgactattttgtactaaactgatagtctttggtacagcgatagcatctcttgtaaagtagttttggttaacataaccaactttacgaccatttacataaatacgccaataagttgcatcctttgtcttaattctctggtcagattgaatatgagcatattgataatcgctagcatcagcaatcttaccactaggtttaccattactaatctttttataaacaggataattcttattgctacctactttaaccattaagtcataagaagtacttgtttgagctggtcccttcttcgcactggaatcagtcttagcagtatctgtattactatcagtagttttagaattatctgcaaatactgtatttgtagaaccaattaacaaaccaacacccagtgctacagctgaagtagcagttaaaattttatttgaatacttcaaacctatcctccgtatcttatattttgcattttacttttatattataatatataaacactgttagctaaaatacatttttattaccattgagcttctttatttgacactttcattacgaagtgatttaattagcactgtacttgaaagagtgctaattaatacgaaatcaattaggaggcaaatttatgctagtacctacagttattgaacaaactgctcgtggtgaacgtgcttatgacatttactcacgcttattaaaagacagaattatcatgcttagcggtgaaattaatgaccaaatggctaactcaatcatcgctcaattactcttccttgatgctcaagacaataccaaggatatttcactttatatcaactcaccaggtggtgtaatcacctccggcttagctatcatggataccatgaactttattaagtcagacgtatcaactattgcaattggtatggcagcttcaatggcttctatccttttgactagtggtaccaagggtaagcgtttcgcacttcctaactcaactgttttaattcaccaaccattaggtggtgctcaaggtcaacaaactgatatccaaattgcagctaacgaaattttgaagagccgtaagaagatcaacgaaattttgcacgaaactaccggtcaacctttggaaaagatccaaaaggatactgaacgtgacaactacttaactgctgaagaagccaaggaatatggtttgattgacgaaatcatggttaataagaagaagtaattaattattaaaaattattcacactctaaaaggagcttgcactcattgtgcaggctcctttttcttattctcttaaactctcagctaactcatgtagtttcttaaatcggtgattaactcctgacttcgaaatcggaccatccggaatttgattagctacttcctttaaagttaattctggatgcgccaatctaaaacgcgctaaaacttgcaatttctctggtagatcatctaagccgttttcttgttcaatcagctggatgtcttctacctgcttagctgaagctgaggctgtttttttcatattcgcggtatcacaattaaccaagcgattaaccgaatttcgcatatctcgcataatacgcaaatcttcaaagttaagcattgcattaagtgcacccactatatgcaaaaagtcgccaatttttgcggcttcttttaaataaacaatatagcctcttctacgtttagttgctttagcatttaaataaaaataattattcatcaacttacataaatcctcattatggtcctcataagttgaataaatctccaagtgataacgactcgtttctggattattgacactacctccggctagaaatgcaccgcgtaaataggacattgctccttcacgtgaagtcataattctctgcggaattcgcgttaccaaacctttttcaggatcccagatttgtaagttttctaggatttcttgtaccttctgattcaatcgtaccaaatattgattattttttttcaatttcatcttgcgcgagacaatcagcaatggctcaataccataagcaatcttaatcagcttaaaaattcgtcgagcaatcgcaggattttctgtagtgatatctaggctaaattgatgatcgtgcaagtttaatacaccattcattcgcaaaaaagcagctaactctgctttggcatgctctggatgcacctcaagcgaagttagctcctttttgacttcactagcataactagccatcattttccttcattcttttacgtgacattgattcaaatgccagattaataatttcttttcctaccttttcaccatcatgaaataccaatccatgacgttgatcgataaagtcatcagtaatgacacggcagttttgctttcttaagccttcaaagtcattcttaacaggctcaagataagcatcataatcttctgggtgaaatttgctcatatcaattttggcaccattaaccagagcggtattgatataatttccacctaagtgatcgttaattacctgtacgtgttccgcatcactaaagtgatctgtctcaccacgctgagtcatgatattgcaaatataaataacctcggcgtcagtctcacgcactgcttcacctaaattagagatcatcaagttaggtaaaattgaagtaaataaactacctggcccaagtacgactgcatcagcttgcataatcgaagccagtactggtaaaacagctctaggctcttcatccgaatcagtatcggtcacccagacacgcttaatccgcttatctttagatgtgatttcagtttcaccagactccgtagttccatccacgaattctgcgtttaaagtcaatggttcattggaagctggaaaaacatgaccatcaattttcatcatttttgacaaagattgaactgcatcaaagatattgccatgcatttcattcaatgccgcaataattaaattaccgattgcatgtcctgaaaaaaaggaatcggatgaatcaaatcgatactgaaaaatattcttttcttcctgaggtaagtcactaagtgataccaaaacattacggatatcaccaggtggaactacgttaataaagttacggattgaaccagatgaaccgccgtcatctgaaaccgttacaattgcagtaatttccgcgttttgatcttttaaggcattcaaaataactggtaaacccgtaccgccaccaattacgactacacggggacgtctgcctttaatcacgcgaacaatccttgtttctccatatggcacaggtgcgcacctactttctaatataacgactcacttcacggtgagtaatatcgactggatattttttagctaaatctcgtgccaactgttgggcaattgaaacactccggtgttgacccccagtacaaccaattgcaatggtcaacttttccttcccctctttgatatatccagggatagctgtttcaagcaaatcaagcaattttttataaaagacctgtgtttcttctttgttcatcacatagtcaaatacacgcttgtccagtcccgtaaatggtcttaattctgaaatataaaatgggttaggcaaaaaacgcacatccattacaatatctgcatcaattggcatcccatacttaaagccaaatgacatcacttcaattgaaaatggctgccgcttgcgatcactaaatgtattgattaatttttgctttaattccttagtcgacaagtttgacgtatcgataatataatttgatctatttttaattggcattaaaatacgacgttcttcttgaatgccatcaagcaagcgacctttgccattattggctaaaggcggaagacgccttgtttctttataacgagcaaccaagacatcatcggaagcatccaaaaataggatagtagcttgcacattgccattatcttcaagtgaattaacttcatccaataaatcgcgataaaatgtcttaactcgtaaatcaattactacggctaccttatgaaagtcattggaattattaattaaatcccaaaaactacctaataaagttggaggaagattatcgactacaaagtagcccatatcttctaagtcatgagcgaccacagttttacctgctccgctcatgcctgtgactattaataattgttttttctcatcagccatgttaaaatcctcctctttacaaattatatcataccgggtgtgtcataattgtgcaaaaaaaagaagcctttcggcttaaatttttatcaaatattaacggtgcataaatgcaaccacaatttcattaatgccaaagactaataaccagaatgcaactaaccatactaagcttaaggctgcgattactggattaataattaagaagaaggcaataatcaaacttaaaatattcaaaatcaagttaaatacaaagtatccggttgaaaatgcacgtaagtgccatgaccaagcaatacctacaactgaatcaacaaagaaccagattgcaaataagtaagcgatagtcaaaccaccaatatcatatgagcaaatgaacaagataccgataatgatatctaatacacctgacacaattgctacccaactacgtgagaaaaattcacgaaagcgtgagtaagcagccaaccatacaataccttgaacgattgatacaatagcaaaaatcaagacaaatgcatgcaaccctttagctgggtgacgtaataacacgaacgcaactacgaccattaagataccggcaataaatgcgccacagtcaaagccgcgattatctctagaactagaaaaaatatccatttttattcctccttgcagactattttacacttattcaaggttaataaaaactattggctattgtcttctagcctatttttttgcttcttttgttagtttagtatcgcgttctaagactggtttcaaatactgaccagtatagctttctttaactttcgctacttcttctggcgtaccggtagccacaatttgaccgccacgttcccctccttcaggacctaagtcaatcagccaatctgcatttttaattacatcaagattatgctcaataattaaaaccgtattgccttcatctaccaaccgctgcaaaacttctaataaacgcttgatatcatcggtatgcaaaccggtagttggttcatcaagaatatagaaatttttaccagtagaaagtttttgcaattcagcagctaatttcattctttgagcttcaccaccagataaagttgtagcggattgacctaatttcacatagcccaaacctacatcaacgatagtctggagtttacgctgaatcttaggaatattttcgaaaaacttagttgcttcattaatcgtcatatcaagcacttgagcaatattctttccccgataagttacttccaatgtttcagaattataacgagtgccgtgacaaacctcacatggtacatacacatcaggcaaaaagttcatttcaatcttgataattccatcaccatgacaggcttcacaccgtccacctttgacgttgaacgaaaatcttgctttagtataaccacgcaattttgcttcattagtttgagcaaataaggttctgatatcatcaaaaacactagtataagttgcaggattactacgtggtgttctaccaatagggctttgatcgatatcgataattttttcaatattcttgtaacccttgattgacttatatttgcctggcttagttgaattattgtttaatttttgggctaaagcgcgtttcaagatcatattaaccaaagtagatttaccagaacctgagacaccactgaccacaataaatttgcccaacggaaaatcaacattaatattctttaaattattttcttgagctccagtaattgtaatctttttaccattgcctttacgacgcttcaatggaaccggcacaaattttttaccagacaaatattgccccgttaaagaatcaggattctgctctacttctttagtagttccttgtgccataactttaccaccgtaaacaccggcaccaggtcccatatcaaccaaatagtcagcttgccgcattgtttcgtcatcgtgctctaccacaattaaagaattgcctaaatcacgcattctctttaaagaagcaatcagccgatcattatcacgttgatgcaaaccaatagatggttcatccaaaacatacataactcccgataagtttgagccaatttgagttgccaaccgaatacgctgagcttcaccaccagacaaggtattagctgatcgagaaagagttaaataatctaatcctacactatccaagaatgaaagacgatcgcgtacttcctttaaaatcggcttagcaatcatagtctcttgctcgcttaatctgacgtccttaaagaaatcaagtgctttatcaatagaaagctccgaagcttccgcgatatccttgcccatgactttcactgctaatgctttttcattcaaacgcttgccgtgacaagttgaacaagtaagttcagtcatatatttgcccatcacatcacgcataaacttggacattggtcgtttataacgccgctcaacattggccattactccttcaaatggttgaacggtatcattaacgccaaagtcaccagttacatggaatttcaccggcttagttgagccatgcagaataatgtcgcgttgacgtttagttagtttattaaaaggcttatccatcggaatttttaatgccgtgcaagcttgttccaacatttcagtatagtaattggaagtcttccatggagccagtgcaccttcagctaaagattttgttttgtccggaacaaccaaatcttcgtctactgctaacttcatccctaacccatcacaatcagggcaggcaccaaatggtgcattaaaggagaacagtcttggttccatttcacccacagtaaagccacactttggacaagcataatactcagaaaagttaagcatttcaccgccaattacatcaacattcatgtagccatctgacaaacgaagtgcagcttcaacagaatcaaataagcgagacttaatgctatccttaacaatcaaacggtcaacgacaatatcgattgagtggcgcttgttcttagctaattcaaaatcctcaccaatttcgtgcatctcaccatcaacaattacacgaacatatcctgcacgttgtactcgcttaaatacttccttgtgttctccacgcttagcacgaataactggcgctaaaatttgaattttcgttctttctggtaaagccatcactcggtcaaccatctgatcaactgattgtcgttgaatcagcgtcccatcattaggacaaattggatggcctactctggcccaaagcaaacgtaaataatcattaatctcagtgacggtcccaactgttgaccgtggattatgtgacgttgttttttgatcaattgaaattgctggatttaaaccatcaattgaatccacatctggtttatccatttgccccaaaaactgtctagcataactagaaagtgattgcacataacgtctacgcccttctgcataaagcgtatcaaaggctaaagaacttttacctgaaccagataagccagtaataactactaacttatccttaggaatagttaaattaatgtcttttaaattatgttcacgtgctccgcgaataacgatcttatcatttgccattaaaattctttccttttcttgtcttcggttttcttgatgatttttgcaattccataattgcatcccgcaagttagcagcttcttcaaagtcaagcttcttagctgcttcttgcatttgctcttgcaagttgctaatcattgtcttcttttgcttagccgtcaattcatcaaaattaagatctgcaaaactatcagatttttcttctttttcactcgacggtttagtaatcgaaattacgtcttgaatcggcttaatgattgtcttaggcgttatgccatgctctttgttaaattccatctgaattttacgccgacgcttggtagctttaatcgctgctctcatggaatcagtaatcgtatcagcatacattattacttcaccattggcattacgggcggcccgtcccatagtctgaaccagcggccgatatgctctcaagaagccttccttatctgcatccagaattgctaccagtgaaacttccggtacatcgattccttcccgcaacaggttaattccaattaagacatcgaacttacctaaccgtaaatcacgcaaaatttgcattctttccagcgtcttaatatcagagtgcaaataacgtactttaattcctaagtccttcaaataatcggttaagtcttccgccatttttttggtcaaagtagtaacaaagactcgttcatgacggtcaatccgtttattaatttcgccaactaaatcatcaatttgaccctcaattggccttacttcaatcttgggatcaagcaatccggttggtcgaataatttgttcaaccttatgatctgttcgttcaagttcataatcacctggggtagctgagacatacaaaatttgattaacatgcttttcaaattcggatagctttaatggacggttatcaagtgcagatggcaaacggaaaccatagtcaatcaaggtttgcttacgattacggtcaccattgtacattgctctaatttcaggcatagtagcatgtgattcgtcaattaaaattaagaaatcatctgggaagaagtccaacaaagtatacggtggctctcctgcttttcgtccttccatatgccttgaatagttttcgattccgttggtatagccaacttcacccatcatttccatatcataggtagtacgttgcttgattctttcagcttcaagcaatttgccttcgccttcgaactttttaacctgcaatttcatctctttagaaattgctcccaaagctcgccgcaattgctcgtcattggtcataaagtgcgtagctgggaaaagcgaaatactctcacgctcaccgatcacctcaccggttaacgaatcaacttcaacaatgcgatcaatttcatcaccaaagaattcaattcgataagcatgattagaattgccggctggaaagacctcaactacatccccgcggacccgaaaacgaccgcgttgaaagtcaatatcattacgatcatattgaatatttaccaaatcacgtaacaaggtattacggtcatattcttcgccttcatggatcatcaagacactgcgcgcatactctttaggatcacccaaaccatagatacaagaaaccgaagcaacaactactacgtcattacgctccattaaagctgaggtagtagcatgccgcaactgatcaatttcatcattgattgccgaatccttttcaatataagtgtctgattgtggaacgtaagcttctggctgataataatcatagtatgaaacaaaatattcaactgcattattaggaaagaaacttttaaactcaccatatagctgccctaccaaggtcttattatgcgtaataactaatgtaggcttattcagcttagcaataatattggccatggtgaaagttttcccagtaccagttgcaccttccagaatctgttctttatatccttttttaaatccagcagtcagtttatcaatagcttgctcttgatcaccggctggtttaaactttgatactaattcaaatttgcgatttttttgtcgtttaatcataaaaaactcctcaagaaaaaagttggacaagcatagtccaactttttaattagtatctatattttactaccgcgaacgtgctttcgcacgaaaaatgcttaattatttaagtaaatctgctaaagccttttgataatcttcagctgccttttctgcagtggcaatgtcttttttgtttacaccaacataggccttaattactggttcagtacctgatgggcgaagtgctacccaggtttcatcatctaagaagtacttcaacacattagattctgggaacccttctaatggtgtcttcttgccattttcaatagtttctttttgcaagaaatcttgaatcttaagcactttactaccgccgatttcggttaagtgctcattacgcaacttgctcattaattcggccatcttcttttgaccaccaatacctggcatttcaattgcacgggtaatttcataagcaacgccatacttttgccaaatttcttgcaaaccatcaaagacagtcatcccacgtgaagcatagtatgaagcaacttcggcaaacatcaatgcaccctgcatagcatccttatcacgagcaaatggtttaaacaaatagccatagctttcttcaaagcccatcaagaacttagcatcaccagctttattcatccggtcaacttcttcaccaatgtacttaaagcccgtcaaaacatgcttagtcttaataccaaagtcctctgcaatcttaaatggcaaagcactagaaacaactgaagtaacgatctcataatcaggggttaattgaccattttccttcatatgagccaataggtagtaagccatcaaagtagcaatttggttaccagtcaaaacttggaaatcaccatcagtttttctaactgctgcacccattctatcagcatccgggtcagtagcaataatgacattagcatttaccttatttgccaacttaaaaccaggttcaaaaacatcacggtattctggattaggcttaattgtggttggaaattctggatcaatgattgattgacttggcacaggaatcacattatcaaagccgccttgtctgaaagcacgatcataaagcatcttgcctgtaccatgaagtggagtataaatgatctttaacttgtcagcgttggccttaaccatctctggatcaacagttacttgcttcaattcattcaagtaatcttcatcaacatcttcacctattaactgcaaaatgccattagcacgcaattcttttactggtgcagccttgacagcaaaaatatcagttactttttgagcataagcaaaaagtcgatctgcattatctggtgccatttgtgcactatcttcaccgtaaactttatagccattgtattgcttagcattgtgtgaagcagtgatattaattccagcgaaagtatgcaaatgacgtactgcatatgaaagttctggtgtcggtcttaaatcatcaaataagtaaacatgaattccgtgtgcacctaaaactctggcagcatgttctgcaaactctcttgagtgatatcttgaatcaaaggaaatagctaccccacgctttttagcatcagcaccattttcttcaattaaacgagctaaaccttcagttactcgacctacagtaaacaagttaatccggttggtaccgggttcaagacgaccacgcatccccgcagtaccaaaattaatatcctgtccaaaggcatcttcgatccatttttcatccttgcccaaagtatttaattgatcttttaaataatctggtaaattagtagctttttgccattctgtataaatttctttagcgtccatcaatgtcctctattcattaaaaatcggatttctaaagcgctttcaaattattaacaattttctattatctgctattaattataaaacttattagtcattaatttaagctttagacaaaaaaagacatgtccaatacgaacatgtcttaatgaaaaaacgaataaatttaatttttcttgtcttgtaagtcttggtagtaattatatgcagcttgaccagctacactaccttcaccaactgcattagcaatttggcgtaaatctttttgacgaacatcacctaaagcaaagataccaggcaccttagtttccatatgatcatcagttacaatccaaccatggtcatccaagataccaagatccttaaaaggttcagtttgtggtaaaacacccacgtaaataaagacaccagcaactggaatttctttttcggcaccagtttccttatcgcggtacttaacccctgtgactttcatgtcatcgcctaagatttcttcagtttgtgcattccaaatgaaatgcatcttcttgtttgcaaatgcacgcttttgcaaagttggttgtgctcgcaattgatcacggcggtgaataactgtaacgctcttagctaattgtgaaagataaattccttcttcaattgctgaatcaccaccaccgatgacagctacatcttcatctttaaagaaagcggcatcgcagacggcacaatatgaaacacctttgcctgaatattcttcttctccaggcacattcaaatgcttatgatctgaacctgtagcaataattacgatcggtgcacgatactcattgccatcatcagttttaactaacttatcctcgccatcgagttcaacactttgtacgttgccatacttataatctggttcaaacttcatcattgtgtcgtacatcttttgactaagttctggacctttgatttcagaaaaaccaggataattgtcgatagcatcagtattgttcatttgaccgccatagggaccgcgatcaagaacaagaatctttaagttagcacgcgcagcatataagccagcagtcattccaccaggacctgcaccaataataattacgtcgtatttatcagccataatctatccttctttctacttacttttgataagcaaataatacaatagatttaacttcttgccaactattttgcttatcttttataaacgaatttcaggctttggttctctacccatcattttcttaatttctgtatcaacatcagcatcttcataaagaacacggtagattgcctctgaaattggcatatcaatgcccttttcttcacataattcgtgaacagctttaacagtagtagcgccttcgacaacttgtcccatatttttcaaaacataatctaaagtcttgccttcgccgatttgtttaccagcacgccaattacgtgagtttactgaagtacaagttacaattaagtcaccaatacctgacaagcctgagaaggtcattggcttagcaccaaagtattgcacacccaaacgagtgatttctgctaaacctctagtcatcaaagcagctttggcgtcatcaccatatccttggcctactaaaatacctgcagcaatcgcaattacgttcttaacggcaccaccaacttctacacctactaaatcatcgttagtgtagaaacgaacgtagtcattggagaacaattcttgtacccgcttagcattttcttcattagttgatgcacatgcaatcgcggttaaatctttttgagcaacattttctgcgtgactaggacctgaaattgcaacaatcttatcttcatcatctggataaatttcttcagttaaaatttcagaaataagcttcttactgcctggttcaatccctttagttgcagtaactaacagtggcttagcacccgtcttatctaaaaccttgcgtacgtttttagcaacgattctaactgccttagttggcaaaacaaataaaacaagttctgccccatcaagagctgcttccaaatcaccagtagccttggtattctcatttaatttccaatccttcatatagtggctattggtgtggtgagcgttaatttcttcattaacactatcaatgttaccgtaaagagttacatcgttaccattatcggctaacattgaacccaatactgaaccccatgaaccattacctaaaactgcaatctttgtcattttttctctcaaactttctaattaaaatcttttattaattctaatctcttgaatacgggtattttaatccactaccatccaaataccattttggattaacgactttccgccgataaatccataaaataattgtagcaataaagaggattaaacttaatgcctgtgatactcgtattataccaaaaatatacagactatctgtcctcattccttcaacgaagaaccttactacactataccaaagaagataggtcatgaaaacttctccctgcttgaagagatgttttttatgacgcaaggatagaattaagattaagccaatcaaattaaaaaatgattcgtacaaaaaagttggttgataatacgtcccgcctattttcatttgctcaataataaattgtggtaagtgtaagctttgtaaaaaatgaagagtagttggtgcgccgtgcgcctcttgattaacaaaattaccccagcgtcccaaaatctgagctgccatgactccaggagcaatgatatccagcattaaaaatggaggtagcattcgtttataacagaaaatcaacagcacaattaagccggcaattaaaccaccataaatcgcaatcccaccattccaaatcgcaataatttgctcgggatgctgtgaataataaccccattcaaaaatcacataataaatacgtgcgccaacataccctaacggtactgcccacaatagcaaatcgacaaaatcatctggaataatttgacgtttttttccttcgttaatcgccatccagcaagctaacataatggctactgccataatgatgccataccatttgacacttaaattccctaaatgaaaggccaccggattaattactaaattagtcattatgcggcaccttattcgtatcttcttttgagtgctctgaaatcagactagtcaaattattatcaaaagtttgagttgcatcatagcccatcttcttagctctgaagttcatcgctgcaacttcaataataatttcaatattgcgtccaaccttaactggaatattaacctgtggaattggtacattgcagatttcacgcgtattttcttgaaaacctaggcgatcataattagcttttggatcccaattaaccaaattaattaccagttggatttctgttctattttttacggcaccggcaccaaataaattcatcacatcaataatgccaattcctctgatctccattaagtgctttaagatctttggtgcttcacccacaacggtattatggtctttttgaaaagcatctactcgatcatccgcaattaatctgtgtcctctttgaactaatcccaaagcagtttcagacttaccaacaccagatgcaccagttaacagcacacccatccctttgatttcaaccaaaacaccatgaatgctggttcttttggctaaacgagcacgcaagtattcagttaaaatactggatatgtaggtagttgactctcttgtacgcaaaattgggattttgtgttcctctgctgccgtagttaattcttccggtacaggcaaagagcgagaaatcaaaaaacacggtgtagccttagtacacattttgttaaagacatgcattctaatatcatggtccaagcgtgccgcatatgaaatttctgtccgacccaataattgaattcgttgcgcaggataaaaatcaaaataaccagttaattctaatccagggcgataaatatcagaaacataaatttcttcatctttgatatattcctgtccttggtaaacttcaaggatactctgattgtcctggatcaatttgcttaatctaacttcatcagccatattaggcctcctaactatttatcaatatctttagtggtgacatttctagctttttttcttggtctaggaccagaagtactagtagccttaaaccactcacgataacttccactacttggcatattatcttgatttttccttccagtaaaccgataaataagccaaatgattaaaatcgcaattacagctactggtaaaagtaaaataaatgccttaaatagaacaaacaataaacttaaaataattagcgctactaaaacaagcgttacaatttccattaaactcattttttaacctaatctggattctcttgactaagcaaccactgtaaataggaataaataaacggttgcaattttccgtccattactccttgagcgtcagctgtttcatgacctgtccgcaaatctttcactaggttgtaaggatggaaaacatatgacctaatttgtgatccccagccaatctccttttgatcgcctttcagagcctgcttttgcttacgctttttttcttcttctaagtgaaaaagctttgctcttaattcattcatcgcagtttcacggttttgcaattgtgaacgctgtgcctgagacgtagtcacaattcctgttggtaagtgcgtaattctaacggcactagaagttttattaatatgctgcccaccagcaccactagagcggtaaacatcaacccgtaaatccttaggatcaatatcaatttgaatactgtcatcaacttctggaatcacttctacagaagcaaatgatgtatgccgtcttttagccgcatcaaatggcgaaattctaaccaaacgatggacaccattttctgatttaagcattccgtaagcatttttacctacaattcgcgcactaacgctcttcaacccagcttcttcaccaggctcataatcgttgatttcaaatttaaaaccagctgtatcacaataacgttgatacattcttagaagcatctgtccccagtccatcgcttctgtaccgccagcaccagggtgaatttccatcaaagcattatggctatcatacttacccgacaagagcaggtctaactcataattatgaaaatcttcttgcagcgtagctagatccgcttcaacttctttttgcaagtcaggatctggttcttcacgcaaaagttcaaccgcagtagtttcgtcttcgtagctagtttgcaattttaaaaatgaatcacgtttttcctttaatcggttggtttcactaattaatttttgcgctttttcctggttattccaaaaatcaggctgcgccatcttgttttcattaatttcgatgctttcatcaatcgcatctaagtcaaagagaccccctaaagtgatttagacgtttttttagttcatctaacacactttgaatttcactaatttccatttttacctaccatcttttattttattgcaaaaaaagggaagctcttaactcccctttttctttattaacgactaagattttgtctaatttcagccttcatgaacaaacgagttacatcaaattcaatatttgaaatcatttcttcaaacattctgtaaccagaatcttgatattcaactaatgggttcaattgaccgtatccacgaagaccaattgattgacgcaactgatccattgcatcaatatgatcagtccaacgatcatcaaccacacgcaagataactaccttttcaaattcaagcatttggctaggatcgcctaaggccttttccttatcttcgaagttttgctcaacaatgtcataaagcttcttcttcaaatcttcaacactaatagtcttgaagtcaattgagtcagttaccttgtctgaagtcaaacttgaggaaatgaaatcgcgtaatgagtcaagacgccattccttgcgttcaccttgagtaaacattgctacttggtgatcaattgttctgtgaatcattggaattaaaacattcttcaatgacttatcagcttcaatgacctgcattctttcgccgtagataatttcacgttgaatacgcataacatcatcgtattgcaaagtttgcttacgagtatcatagttattaccttcaacacgtttttgagcagattcaacttggcgagtaatcaagcgactttcgataaccttatcatcatcattatctgataaacgatccaagaagtccttaactcgatcaccaccaaaacgcttcatcaaatcatcttcaagcgacaagtagaatctggtgtaacctgggtcaccctgacgaccagaacgaccacgaagctggttatcaatacgacgtgattcgtgacgttcagtaccaataactgccagtccaccaagttccttaacaccaggcccaagcttaatatcagtaccacgaccggccatgttagtagcgatagttacggcaccacgttgaccagcgttcatgatgatttgagcttccttagcgtggttcttagcgttcaaaactgcgtgaggaatacctgctttatcaagcatcttactcaaacgttctgaactttcaatggcaacagtaccaaccaaaacaggttgaccattagcgtgacgcttcttaatttcttcaactacagcgtggaacttagagtccaaagttggatacaaaatgtctggcatgtcttttctggcaattggacggttagtaggaatcgtgattacctgcatgttgtaaatttcacggaattcttcctcttcagtcttagcagtaccagtcatacctgacaacttcttgtacattctgaagaagttctggtaggtaatagtagcttgcgttcttgattcttcttgaatcttaacgccttccttagcttcaatagcttggtgcaagccatctgagtaacgacggccttccattacacgaccagtgaatgagtcaacgatcaaaacttcgccatcttgaacaacgtagtcgatatccttaagcatgatgtagttggcacgaagagcttggtcaatgtggtgaaccaacttttggttttcaacatcgtacaagttctttaggccaaagtgttgacaagccttttcaataccagttctggtaagtgaaatagtcttagttggccagtcaatcttgtaatcgccgtgatcttcatcatcgtcggcatcatcatcgctcttgtcttcagtcaaagtcttaacaaagcggtcagcacggatgtaatcactgtttgcttgttcagcttcaccagaaataatcaaaggagttctagcttcatcgattaagatagagtcaacttcgtcgatgatagcgtagttcaatggacgttgtaccatttgttccttgtaaacaaccatgttgtcacgcaaatagtcaaagccaagttctgagttagttgagtaagtaacatcacagttgtaagctgcacgcttttcgtctggtgacattgagttcaagttcaaaccaacagttaagccaagccacttgtaaagttgacccatttcttcttcgtcacgacttgaaaggtattcgttaacagtaacaacgtgtacacccttgccttcaagtgcgttcaagtatactggcatggttgctgtcaaagtcttaccttcaccagtcatcatttcggcgatgttaccgtagtgaagtgcaataccacccaaaatttgtacgtggaatgggtaaagtcctaatacacgcttagcaccttcacgagcaactgcgaatgcttctggtaaaagatcatccaaactttcgcccttctttaaacggtcacgaaattctggtgtctttgcttgcaattgttcatcagatagcttgctcatttcatctgcatgagcttccaccttatctgctattttttcaaactttttaagttctcgtttatcatcgttatatagtttctttaaaatatttgccattaaatcggtccttatatgtcgtaaagtctaaaaatacagattaattttaacatgattgctatcaaaagaaaaatatctcacacaaaaaaccccacgcaaaactcacgcgaggttccaatgtgtaaaagtattttaactcaattattcgttagtttcaatcaaaccgtaacgaccatcgtttctacggtaaacaacgctagtgccgttagtttctgcatcttcaaaaacgaagaagtcatgttccaacatgtccatttgtaaaatagcttcttctggatccattggctttaagcttacacgcttgttacgaacaatatcaaattcgctaggcttcttttcttcttcttcaggttgttctacaaagaaatcttgtaatcccttttcacgactctttctatttacacgagtcttgtactttctaatttgacgttcgagtttttcagaaacgaagtcaatgctacgatacatatcatccgtggtttcttcggctctcaaaactaagtatggtaaaggaatagtaacttcaactttagctgagtgatcacggtatactctcaagtttacgtgtgcaatcacatcttgattcaattcgaagtacttctctaacttgtttaaccgcttttctacataacttctcaaagcatcagttacttcaatattttctccacgaacattgtactttaacatataagattctcctttcaccgctatgcggtttttctttacaaatttattataccaaaaaatgtaagcgtttcataacaaatctaatgacaaattgaaaagctttcaattttcatttcgggaaaaccctgctgtaaacggtcccgcgcgtgatatagcgtgcgcccggtcgtgtaaatatcatccaaaattaatacttttcctgaaactatattttccttgattttaatatttttatcaatcaaaaagctttgaggcgttttaagccgctcctctttgtttttctcaccttgggcatgactacccgattgtttaatcagaagcggtgtcagcggcaaaatatcagcataaatagcaaaaattgtatcaaactgtcgtcttgattgatgttcaggtgaagtgggcacgggcacataaaagtcatagttagttttacacaaatagtcataacacaaatcttgcaatacttcccgcaaaacataatctccacgccgcttatacgcaaccatcaagtcatgaaaagcagaattataacgatataaagcatgattatgcagaatatttttgccataaatggcttgccagtttcgacaatcgctacacataaagccttgacttagttccttatcacagccagagcagcgattgtctgctagcttttcaaattgttttaaacactgtaaacaaatcttattttttcgcgctggtttaaaagaaaaaagctgtgcaaattgtaccggtgatgtaaactcctgctcacataataaacaagttctcatctattcatccccttgatctgcttaatactctgtcgaatattcttggtataacgatgataacaatacaaaactaagcccgtttggtcatcgtgagcccgaccaactcgacctgcaatttgcaccaaactagcagcagtataaattgcatcatctgctgcaataataattacccaaacatttttaaaagttacaccacgctctaaaattgtggttgtcaacaataaatcatatttacgatcacgaaaaacctgtactttttctaaccgtggcggatcttgtgcatgaacaccggccaatttaattttgttttgcaactttttccgcaaagcttcttgataaagcggaatttcttcaatccgtggtacaaacaaaagcaaaggatgaccactttgaatgacttttttaatctcctgcattaatttaggatgaatttgtcccttccgcaaaaacggcctgataaaaagcctttctcttggtacaggcaataatccaccatgaaaacgccgatttaagcgcaaaatttctaacttccctgttttagcttccaaaagcaaatcgttcgttggcgttgcggttaaatacattcgagtcccagttgttttaaccgcattttcggccgcaaaatgtagttgcggattacctacataaggaaaagagtctacctcatcaattaccaataaatcaaaggcacgataaaacttcatcaattggtgtgtagtacaaattgtcaactgctctagccctatttccttaaattcacggccatgatacttaccgatctcaacttgggcaaacgctgccgaaaatcttggaaacagctcatttaccacatcaattcttggtgtagcaatacaagcgcgctgtccttttttcatacatcgagcaatcaactgaaacaacatctcagttttacccgccccagttacagcatgaaccaatgtattttttctttgttcaaaattttgtactaatttatccgaaatattctgctgcaatggggttagtttaccttgccagcttaatcccccgtttttaacatgagaaaaagtattattactgtcttttctaataagccaatcgccctcatttgcacgtcccaagccaatacacccacgacaataatatttaccattaggcagtcgactattaacttggctgccacagcgattgcatttacctttttcaattactgggattttgcggcatccctcaaatgtgctagaatcctcttgactaacaatccattgacgacctgataatagagtcaaatcttccatatttttacctccctattatctattacgcaaaaagaggcgattattttgtcagaaaaggaaaattttttaactattaaagaaaacggcaccggtgaattaattatcaaaaagagcagattcattgccaatattgcccgcaccactactactgatgcggcaaatgattttattcaaaaaatctctaaaaaatatcgcgatgcttcgcacaatacctttgcctacacgatcggcttaaataacgaccaggtcaaagaaagcgataatggcgagccatcaggtacggctggtgttcctgaattaaaagcattgcaattaatgaatttaaaaaacgttacagtcgtagtaacccgttattttggtggaatcaaattaggagcaggcggtttaattcgcgcctattccaatagtgtcaccaatattgttgaaaaagtcggcgtcattaaacgcgttttacaacaagaattaatttttagcgtaccctataaccgcttcgatgaagttgatcattacctaaaacagcaaaaaatttttattgccaataccgaatacggtgtggatgttaaaattcatatttttgttaacgatgaccaacaagctaaacctaaggaagacctaactaatttattggccggacaggttacctttactaatggtgaaaaacgctataatgaaattcctgttgaagctaataattatcatgaacaataaaaagagcatttggatatttccaaatgcttttttgctacttattattttttttactcttcaattgatctggtttttcgtctcctaagtgccaaacttcaattgttggatcagttttactcttttgattaataattttctgaattacatgcatcaaaggatggtatttttcacccaataaaccaattgattccacaaaatactctaaggcaatcagcaagcctaagatcagaagccaagtgccccaagttggcgaaagcaggaataataaagaaataaatgagaaaaccaatgataatgcataaatagtcaataccgtctgtcggtgcgttaaccccattcgcatcagctggtgatgtaaatgatgcttgtctgcttctgaaattggctttttgtttagctttcttcgaatcattgcataaacggtgtcagtaataggcactcccaaaatgataattgggaccaacaatgaaataaaagttacattctttaaccccttcagagataaaacggcgatcataaaaccaatataaagtgcacccgtatcacccaagaaaatttttgctggatgaaaattatatggtaaaaagcccaataaacaggcagctaacataaaacaagcaattgggacatatagctgatgagtgtgcaagaagaaataacctacgatccccatggtagtcagagaaatcattgaaaccccatcagctagcccatcaagtccatcaatcaagttaactgcattagttaaagctaagatccaaaaaatagtaattgggaaactccaccaacctagatttacttcatgtgcgatgaatggcacctttaacacattcattctgattccagctaaaaagtagataatcaatgaagcgataaaaatcccaaacattttttgtctaggttttaactccaaaatatcgtcgatcaatcctgtcaaaacaattacgcttgaagcgagtaaaatcgaaaaaatttcatgagtcggaaattgctcacgcaacagaacaaaagtaccgatattaaaagtaacaaaaatccccagtccaccaatcgttggcattggtttcttattaactcgccgggcattaggattatcaacagctcctaagacaaaggcaagccgtcgaataaacggtgtaattgccgctgaaataattactaataagaataattcaacaataattttaaacatatttggctactttccttatttacttgttctaattatacaagtagtcagtattttgcacaaatagcaaaaaaagtttggaaaaattatcttccaaactttttaatttatttagcgatcgccacaactcttttttcacggataacggtaatcttaatattacctggataatcaagttctttttcaacctgattacgaatatcacgtgccaaaataactgtccgatcatctgaaatttcgtcaggttcaaccatcacacgcacttcgcgtcccgcttgaattgcataagcttgcttaacgccttgatagctcttagcaatcttttccaattcggtcaaacgtctaatataattttccaaactctcgcttcttgcaccaggacgagcactagaaatcgtatctgctgcaacaacaagttcagcaataaacgacaacttaggcacatcgccgtggtgtgcagcaatcgcatttactacaacatctggttcatgatatttacgagttagttcaaccccaatttctatatgggaaccttcaatatcatgatcgatggctttaccaatatcgtgtaataaccccgcgcgaactgctaatttttcatccaagcctaattctgcagccatcgtgcctgctagcttaccaacttcaattgaatgtgacaaaacattttgtccataagaagtacgatatttaagacgacctagtgtcttaactaattcaggattcatccggtgaattcccagctccatcaaagcactttcacctgcttcatagatgtcatcgttaacttcttttctggccttatcgaccatttcttcaattctagctgggtgaatgcggccatccttgattaagcgttccatcgctcttttggcaatttcacgtctaattggatcaaaaccactcaaggtaacaacctttggcgtatcatcaataattagatctattccagtcaaagcttcaaatgaacggatattgcgtccttcacgaccaataatccgtcccttcatctcttcatttggcagatcaacaacagatacagttgtttcggcaactgtatctgccgcgctactttgaatagcatccacaatgacctgattagcataatgatcagctttagcttttacttcttcgttactatttctgatcatctcggctcgttctttgactagttcatcagataattgactaagcacaatcttcttggcttcttcctcatccaacttagctacgtcataaagcttttgccgtctagtttctactaattcttcagcctcagttaattttgcctttaagctagcatactgctgctttaattggtcttccttttgcgtgagtccactttcacgttcatctaataaagaattcttatgatctaaggtatcttcacgttgttgtaaacgatttttctcccgagctaaattatctttcttggaatttaactcatcctcggtcttttgcctaaaatcacgaatttgttcttgagcttcaagaattttttcttttttagtattttctgcactttgcttaacagccgctgctgcttgcttttgtgcattaacttcagcttgtgctgcagcaacctgtgccttagcatcagctaaaatgtggtcagcatcattctgggcattttgagctttttgttcccaagaatgcttgcgaattgcataaccaaccactgaacccaccaagaatgaaacaatggcagttgcgacgggaatcataattgttaacatattattcatgattactatcgccttttttagaattattcacacaacttttatgataaagaacctatctgttcatgtcaattaaatcaaaaaaccttggaaaataaatccagggtttttgacataattatttagcttgttcagactttttatctgtagcagcttctttttctgtcttggcttcttcgcgcttctccttgatcttttctggatcttcacgatcagcaattgacttttcatcaatcccgtaagcttgacgcacttgcttttggatatcttgataaatatctggatgctcttctagatacttcttagcattctcacgtccctgaccaattcgatcactcttgtaagagtaccaagaacctgctttatcgataatgtccttatcagcagccatgtccagtaattcaccactttgtgaaattcccttaccgtacataatgtctacttctgccaccttaaatggtggagcaaccttgttcttaacaactttaattttaactctgttaccaagaacatctcctgattgcttaatctgttcagctcttcttacttccaatctaatagttgagtaaaacttaagagcacgaccacctggggtagtttcaggattaccaaacattaccccaactttttcacgaatctggttaataaagatggcaatagttttggttttagaaatattacctgataacttacgcaaagcttgactcattaatctcgcttgtaaaccaacatgggcatctcccatctcgccttcaatttctgctcgtggtactaaggcagcaacagagtcgactactacaatgtcaattgccccactggaaatcaaagtatcagcgatttgcaaaccttcttcaccagtattaggttgtgacaaaattagtgaatcaatatctacacctaaagcttcagcgtaagcaggatccattgcattttcggcatcaatatatgctgcagtaccaccacgcttttgcacctcagctacagcatgaagggctaccgtagtcttaccagatgattctgggccataaacttcaataatacgaccacgaggatatccacctacaccgatagcagcatctaaagctaatgaacctgttggcactgttgaaatttgcgtatcagctttttcgcccatccgcattacagcacccttaccgaaattcttttcgatttttttaagcgctgcatctaaagcagcctgtttttcgtctttggccattaatgtcctcctatttttcgtacctaataattatactttgaccgccgtccaatttgcaagagaaatgcaaacgaacgttcaaaggattttttaccctctattatttattacgctaaaaatcgccattatttttttacaaaataaaaaaagaagcaaatgcttctttttaatcattcttgacttaatactattttacattgagcccttgaatacgccccatgattggtggaagtaatcgtaacctgagtaaatagtaaagatcaacgcaaggtaaagtaagatagtaccaatgtggaagaagtcaccaatcaataagaaaatgattgataacatttggcaagtagtcttaattttaccaggcatctttgctgctaaaacttgtccttcattttctgctaagatcaaacgcaaaccagtaacagccaattcacgacaaacgatgatagctactacccatgctggagcaagtttcaattcaactaagaaaatgaaagcagtcatagttaacatcttatcagctaatggatcagcaaacttaccaaaattggttaccatattacgtgaacgcgcaatgtgaccgtcaaaccaatcagtagccgaagcaacagcaaaaacgatagcagcaataacacgactccaaacaacagttgagcctgctgcttgaacactagcattcccaccaaaaatgatgattaacataaatactggaatcaaaaagattctaaaaacagtaagtttattaggtaaattcattctaacactcctagattttaattgttgttattatttccaccatcattgccattgttagtgtctgctgatgattgagtagtagatgattgttgagtttgactactttgttgggtttgttggctactttgagtagtagtagatgattgttgacgactgctttgacgagtagcactgctttgagtagttgtacggctttgggtagaactactattggttgtattgttattagtagagcccgtattattagaactactattattttgactagtagttcccttagccttaccaatcaacaaagtaattgtcctgtacgcattgtttgctgtatatgggattttcttacctgcaatagtgattgaagtaccattatcgttgcctaaagtaatcactactctctctgcattgcttggcaaagtcatagtgtgcttttgattagcaagtaaagttgattgccagctattagcattaccattgacttgtacacccgctgaaatattttggttttcaccagcacgcacaactaggcgacggtttttattcaagccagtaactcggtactcattgtcactaaccttagtaaccttaactttattgactactacttttttagctttcttagaagatgacgatgatgacttttgtgatgaaacagttacatcattattatcagcttggttcttttgaccacctgaagaaagacgagcatacaaaacgtacactacaagaattacgataattacaccaagtccgatcgcaattcgtggcaagtaattcttccacaaatttttcttattgtcggtggtttctcgtacttcttcactcttattatcaatcgagttttctacgtactcatctggcttagcttctggtacatcatcgtggtaatcacttaataactccttaccatccaagccaacaacttgtgcatattgacgaataaatgctctaacataaaaatcgcctggaagtttatcaaattcattcttctcaatcgcttcaagatatctgctctgaattttagtagctttttcaatatctgcaattgaaagtcccttagcctctctggcgctctttaatttatctccgatatctgccatatttacctcttcaaattttaatttatcatgttgagtataccataaaattctcattacaacgtcttagttataaaagccatccacctgtaacataaattgtctgtcctgttaaataactactacgtcgatctagcagtgttctaacccagtatgaaatatcactgccattggcccaacgaccaactgggatttcatcttttacctcttgaatcgtatcctcagaaaagaatgcattcattttggttttaaccgcaccaggcgcaattacattaaccgttaagttattggaagcaacttcacgcgcataagcctgagcgaacctggttataccacctttagttgcactatagacgctttctaatgcactacctgcaccaccatagactgagcctaaataaactatacgactaaaatctcgtttcatcagttgtggctctaacaatttagttaacttaattggcacagtaagattaatattaatcagatcagtgatatttgctaatttttcatcacctaaaaaaccatacttagtaattccttgagcaaaaactactgcattaactggcaacaagtttttaacaaaatctgttaactgtgcatcccctgtcgcaaaatccaactgtagcgacataaaatcctggtcaggatgcttagcaaacagctcttgaactaaattttcagctttttgagaattagaatgataatgcaagtataatgaccaaccggcatctgccaaatctcgacaaatatcttgaccaataccgccagttgcaccaaagacaattgctcgcttcaactttatcaaccccttacttgttttctaagtaagcagaacaaagttcactgtctttcataatcttttggcagtagtcataaaactgatcaaaattcattgcctgcaatttagctatattttgtgctaaattttcatgatctaaattttcttcaattaattcaattgccaaataagacagatcattacttgtcctagcagtgcgtgctaaccattctttcttttgcaaaatgaagttttgtctaataaaacggtattccgctgaatttttcttaattggttccgtcaataccctctttatttctgcaattacttcttgagcttgaggacttacaccaaaaatagtagcaaaatcgccctgcctggtgtaattaacagaaatctgcagcgaatccattaacagctgcttttttctcatttcttcaaaccatggtcccattgcacttagttttgattctaacattatttctaacagaatttgagtcaaatcaaagcttgataatactttcttaaagtttttaaagcgaattcctaaaccaaaggaattagaattacctctggctggcaagacttgattatgtaacatgcgaaaactaacttgtttttcagctgtgcttttacctttcccgtgcaaatatttttgctgcagctttcctacttgccgcaaaatcgtttgcacttgattatcagaaaaatcaccgcaagcaacaaattgcatcttttctggcacatacttagcctcataaacttgggtcaagtttttcactgtaacttgattaattgattctttcgtacctacaacttcgatccctagattagaatcaccaaacatatcatgcataatcgcattatttacgctccaagttgggtcatcctgatacatggccaattcttgttcaataatcggagcctcttgcgcgatattttccttagtaaaatacggctgccctaccaattcaaacaagagatcgatcattttaggcgtatgctcaattccactacaataaaacattgtttcattaaaagacgtgaatgcattaacgtcagcaccaatatcttcaaattgcgttgacagatcaccatcttttttggcaaatagcttatgctctaagaaatgagccgaaccggcaaccttttgtggatcactactaccaaagtcaacaattataccgaaaaatcgttgataaaaatgtggctttaaaataatttcggctttaaagcctgactgatattcttttttgataatttttggtgtcatcattttaaaacataactttcattaaagaataaattttgtacgaaagctactaactgcttaggtgtagctctcctaattgcattttcacgatcaaagtctaaatatcccgagaacaattcatcacgcaacatttgacccatctgccagttttgaccgtctagaccaatcttcatattacgcaaaattgcctttttagcctttttaaataaatcatcttctacttcgccctgaactagtttacccatttcggataaaataatttttcgagccgctgcaatcttactaggatcaagtcctgcactgactaaaaacaaagaattattggcaaagcagcttgcttcaacattataagctgctcccaattgctcccgaatttgcgtaaataatttagatgattgatcacctgccaaatattgcgataataatattcccattacttgaccgcgataatcaatactttgttctaaaccaaagcccattaacaattgagcttgcacatttccttgatcatcctctttttcaatcaactttcttttagctggaatagttagactagctgtttgaaatgatttagttaaaccagtttgttgaaacatagcctgagctaatttagaaaccagattattatccctggtcattcctaaaatttgcattggtacattagctaaattacgccaataatgcatcatagtcgtgctagtcgcagctttgatttcatctagtgagccaataaatgtctccgcataatcaggttgatcctgataccacaatttaaaaaactgctccaacgcataattagatggttgttcaatcagttcttgatattcttctgctaattgacgtttagcatattccaccaaaggttctgcaaaattaggttgattaactatttgtgcaatcacattaagaatttcttcatacgtataatgtggatccaaaatctcaatcggctcaacaaaattggcataataagtcaaaagtatttctttaccaaaaacttgtggcataatctccagctgtaaatcatataattctgccaatcttttttgttgtaaagcaagtgacggataacttaagctgctattcatctgtattcgcgctagcaaactagcataagctaaattatgtttagtcagcggcaaacgcaaaaaacagccaatagcggctgttgtaaactttttattttttctaattgcaatattagttgtgagcattgtttgaattaccttcattctttattggtggcactaaaacttgtcgtggcttagagccttcagatggaccaacaatccctttagcttccatttcatcaacaattctagcagcacgattataaccaattctaaacctacgctgcaacattgacacgctggccgtctgttgacgtcgtactaaatcaacagcttgctcatagaattcatctgctggctcatcatctttactatcagcatttgatgaattttcaccttttttaggaatcattgtctcatcataactaacctcttgttgcttcttaacccattcaattacgcgttcaacttcatcactagcaatataagcaccttgaacacgttcaggtttagatgccccaattggcatataaagcatatcaccacgaccaagtaatttttctgcacctgtttgatccaaaatagtccttgaatccactccacttgatacagcaaaggaaattctcgatggtacatttgctttaatcaaaccggtaataacatcaacacttggacgctgagttgccaaaatcatatgaattccggcagcacgtgccatttgtcctaaacgaacaatcgcgccttcaacatcgtgaccaccaaccatcatcaaatcactaagttcgtcaactacaactagaatataaggtaacggcttcatcactggtttagttttatcacgattgttttcagcaactttttgattatattcactcatgtttcgcacgccaccagccgcaaatagcttatatctgcgctccatttctttaacaactttgcgcagtgcatttgcggctagcttagcatcggtcaccacagggatcaataaatgcggcacaccattataaactgaaagttcgaccatctttgggtcaattaaaactaatttaacttcttcaggccgcgccttcattaaaatactggctaaaattgtattaatcgctacggacttaccagaaccagttgaaccagcaatcaataggtgtggcatcttagctaagttggcagaaataatgcttccagttacatctttacccaatggtacatccatcggatcgcttttggctttattatcttgatgttccatcacgtctttgaatgaaacaacagacgttgctcggttaggtacctcaattccgataaagggcttaccaggaattggtgcttcaattcgaatatctttagccgcaagcgccaaagccaaatcatccgctaagtttacaattcgacttaccttaacgccaacagctggctggacttcataacgcgtaatagttggtcctaaaatagcttttttaataatcaccttaacgccaaaactcttaaacgttgattgcaaaacttgggtatttttcttaattaaatcacggtcagtactctgatcagtcgatttaattggatcaagtaagcttaaaggtggcatcttataagctttattgactggcgcatcagtttttagttcaccatgatcgacatcggctaattcctgctttaacttttgatcatcttccgcaaaagaatgtgacttaggtagttcctttaccccgtcatcatgttgtggtgcaatttgaatttgcggttctggatcaggtgtggtctctggctcaacttctacgtcttcagccgtcggcgttacatcgtcatcagttggatcggcagggtcaaagtctgctacattaggaaaaatcggtttatcgtcatcaactaaatcttcgtcttgttcctcttttttctgacgccgcttttccaaaacgtcattatatttatctttgacctttaccccagcttctttattctttttgatgaataattgactaactgtctggaatttttcgataattgttctaaatttaacatcaaaaaacatcaaaattccaattggcagcaataaaatagcaaaaacacggacaccgatttgccctagtagtggataaaaaagttgataagctaatgaaccaattaatccaccaccaatgctctcagtgactccagcacgaccaaactccgcggccattgcatgccaaaaagaattcaggaaattactgttaactaattcatgttcaaaatacaagttacattgaattaacagaattcccaaaaaagcgattgctaaccccaagctacgcttaattgttaagtgaatcggttgattatagattaaatttactaggccaaaaagtcccagtaaacctgccgcaaacaaataagaatccccgaagaacattcgaatcaaatttgcgatttgcttacccaaaataccgaaacggacaaaagccagccccgctattaaaatcaagactaaaccacaaatactccaattaagattttgctttttgtttgcttttcgcttattgtagctctttttggcctttctttgtttcttttttgcaggcatgtactcacctgattaattatcgaattcagccttgaagttcaagttaaccggctgacccaaagttaattgggttgtttcatagatcaaggtctcaagttgctcaactaatggtcgagttagtaactgccaatctgaattactaatgtcagagccatcaccatggtaatcttttaattgcacgatttgatgaatcaagccgcttgcttcaaacatagctggtgcaggaattacatcatattgaatagcaacatcatagtaactaccattttcttctgaatgctcatcgtcaccgctaacatctaattttctaattcctggtctaacgtcactaattggtttggtatcttcatcaactaaatcataatgaaatgcctgtacgataatatctgtctgtttttcaaaatccattatttattctcccctagattacgttcatatctttcaggacgatcatagtcatcttttaacttgtcattttcataatgatgggttgtttccatattaggaaaaccttgctggcgtaaagcttctagcaaaaccattgctacagaattagacaagttataacaccgaatgttatcagacattgggatacgtaaattacggtcatagtattcacgcataaaagtttctggcaaaccagttgtttctttaccaaaaacaaagtaataattcttgttaggatcagtataatcgacttgtgcataattttttgatgagaatttagaaattaaatacatctcatcattaggccctaaagtcttcaaaaaggcattcaagtcatcatgtctgcgtacatcgaccttatcccaataatcaagacctgctcgcttcatttttttattatcgatttgaaaaccaagtggttcaatcaaatcaaggacagtgttagtccccgcacaagtacgagcaatattgccagtattagctggcatcaatggttcatacaaaactacatgattagtcattcaaaaaactccttatcaaaaaaagcgtagcttttaagccacgctttaaaactatctagtatttattcgctttcgtcatgatctgcatcccccgtggtcgaagaaacagcattctcttcaaagagtttagactctcttcgataataattgtacacgcgagacacaataatcttcaagatcgcataaattggaataccgaaaactccaccccataagccccagacggcactagcaccaatcaagagtaaaattgttgtaattgggtgcatttccattttattccccattacccatgggctaagaattcttgattcaattgtttgttcaatagcaaaaacaattaagaccttaattaacattgaacctgaagtcataattgaaattacaattacaggaatcattgctaatggtgtaccaaagtatgggattaagttcataaacccagctaaaattgccaaagccacgccatatggtaaaccaattagaatgtaacccaatgagaacatcacacctacccaaaaggcaacagtaatttgaccacggacatatgaagcaacagcatagttaatatcatataataatttgctaaaactaggttgccatttttcaggtgcaaacttggtaatatatggccgcagttgatgaccatcttttaacatgaagaataaaataaacggtgcagttaacaaagtcatagccaccattgtaataatgctgacggcagatgaaatattgccgatagttgcattgatggtactttgtccagacttaaataaggtcttctgcgtattatcaatcatgcctttgatactgcctttaaatgaatgtaaacgcggatcttgcaacgcattttgtgttgcattaaccgcatcattccaaatatgaggccagttctttatcaatgaattaatctgattctgtgcaattggaaccaagatattaataatccaaattaatgcgacaactactagtaagaataaaactataattgtcaccactcgcggaatcttaaattttctttcacaccaatcaacaaccggattcatgatatagtactgaattaccgctaataataatggcggtaaaattgcactaaagaagatccaggcaggattcaatacaaaagatactttattaaagacccaaataattaaaaagaatagcaggacgtttaataaaacaatactaaaacgattatctaagaaccattttttaaaaacagttccacccctatgttggttattttccatctattcatcctaatttttaaatgtgttcataaacaatatcatcatcaaccttaaaattaggtaatggttgatcaatatccggatcaaagtagatcgcattagcaagtggcgtcttagaaacggtacggttaaagaacaaggttgcgtgtcccaatgccttcatgttgctctctaccatcggaccaacatagtttgcaacataggtttgaccatcaacagtgattgtatcaccttttttaaaaacaaaaccactaactggcgtctcagtactgaatttttgaatgacagaaacgtcttccaaatccttattagcaccctcgccaaataaaattaccatgccatctttattatcgacggcctttttaccaatttttttaatatttgcaatccatttcataatataatctctccttaaaaataattttagcataagaaaagctgcttaaaaacttaagcagcccaaaatcggcgattattttttgctcaacaggaaatcgtgtttttaagcgtctaatccgctttcatgctatactttattttagacttatttttatttagagatggaggcccacatatatgaaggttttaatcggaggttacaccaaaaaaacttccaaagggatttatgaattacctattaccggtgcagcaaatgatgcccgtttaggcaaagctgagaatattattagcgttggtggtccaacttatttccgaaaagatggtaatttaatttttactgttaataacgctggcgataaaggtggaatcagcgtctttcaattaagtgatcaaggcgcaaacgaagttgaccactatttaactccaggctcttcgccagcttatgtaggaattaaccgcaccaaaaagttgatttacattgctaactatcatactgctgtcttgtccgttttccgctacaacgacagtggcaagctcgatctagttgatactgtaactcacaaagctgaaacgttgggtccgcgtcctgaacaagttgacggtcctcaccctcacttctttgatgaaaccccagctggtaacttggttagttgtgatctaggcaatgataccgttgatttttatagattagaaaatgatcaattaaaacacattgctcaatataagtgcgaaactggctttggtacacgtcatatcgtcttcagtaaagatggcaattacttctacgttgtcggtgaactttctagtcaaatcaatgtcgttaaatttaacgaagacacttgggactttgaaaatattgctacttataagacaattcccgctgattttactgaccataacggagctgctgccttatatattagtcaagatggcaaatatgtttacacttctaacaggggacataattcaattgctgtcttcaaagttaacgacgatcatactttgagcctggttcaacgtgtatccacttttggtgacttccctcgtgattttaattgggataaagatcagcgctacgtcgttgtcgctaatcaaaatacagataatgctactctttacacaagaaacgctggtactggtagcctaactcctattcaaaaagaaatttccgtaccagaaggcactcgcgttcttttcaccaaatagtaattaacattagtaccaaagtcatggcgcaatagaacgtcatggcttttttattcctacaacttaaagtaaaatagaaataaatgaaacaaaatataagtcatgtggtaataagtcaaatgaaaggcgatgatatttgttctttttgatcataaatttgagtatatgaaactaagccttggtaaaggttgatttttttaatgttaaacttttgtttacttttaaatttagaccaatttttgaaattaagacctcggtgtcctgtacagtttgtcatctttgagcaatttaaagataactcgtactaattttcttgcagttaatgtgcaagcacgtttatgcggcgagtagacagcttcatcatacttcttttggtaatattttttgaaaacaggatcatgtaatcttgctagattggcagcttcaatcaagtaatatcttagatatctgtttccagtcctggccattggagtatgttcgttgctgtgatctcccgattgatattgattccaggttaggccggcatacttagccagctgttcttctttatcaaagcgatcgatacttccgatctcagcgataataccagctgtataggttttgccaataccgggaattgattccagaattttgctttctggtaatgcatcaacgatacgatcaattgctttttctagatctttaatagattcattaaagctttgaatcatgttgtaatgaacagaaagcactgcatcaattgaatcagtcattactttgcctaagcgatatgaacctctaacagctttcttaattgctttagccaaggtatctggatcggaaaagcgtcctctgcctttaacctgtaagtaagaaattaagtcttcggtaggcatatccgcgatctcatccagagttttactatcggttacaatagacatcattgtagcaccgaaaagaggagtattaatcttatctttatcgacagtgattagtttattaacccgataatataaagcttcaatgaagtgctgtttggtacgagtcagttcttgaactaattcatatctggtacgcgttaaacgctctaaagcaagatagttgtcttgtctggcaatgcttactcgataatgtccaaagcttagatacaaagcaatgtaataagcatcgagaggatcagttttactttcttcaaagactttatgaaacctgctggtttctttggggttaattacatcagtctctacattgagcttttgtaaatcttcgtcattttggaaaaagtaagcaggatgaaaactgtaaatagatgtagcttccatgccaataatgatttgatcatagtgtttattttgagctagatctaaaatttgttttttcagttcactagcaccataaagatcattgacaaagctatcgttaattaagcgtttgttttgatcttctgaatcaagtgcaacgacctgtaaatctttagaactaacatcaataccgacaaataatttcattggaaatggcctcctttctttcaaatttctgatcatagattttgatcttcacatgttaacccctaattacagttcttaagttcaatctcgccagtataagtattcactggttgcttctttgaaagctgcacctaatcccaattgctcaaggactagcaaaaagaagcaatcaatacagcatgtgagttagagcataaaggaactgtctgggtggcagacttataaagcagacaaaactgcaggaggtgataacctagaccagttgaccaaagccaatgacaattagaggctaacatgtgaagatcaaaaagcaaatactaatttgattaattatcacaatatgactaattacaatttatataatacgagaaggtgacaaagtgaaaagaaaaataattcgaatattacttttcattcttggcgggatattagggttactacttctgtataaactctatttaaattaccgtcctgaattgaatttattacttcattttgatcaccataatgaagaagtactcgttaacatggtccgtagccatggtattgaagacttagcctttttatttttacttaatgcgatctgtgtagcaattcctggcttatccaacggaatcttttgtgttctcaacggaatcctttatggccctgcctggggatttattgttaattggatcagtgacattttaggccaaataattttaatggaacttttgcaaaaactctatgacatgaaaaagatgtctaacagtaaagtttataagttattgactggattaaaatcaccaatgcttggattaattattggatatatgattccatttattccgagtgcgacagttagctatgtcaacattatgattaataaggagcaacgtaaaaaacagctaataccaatcattatcggtgtcatccccttcgcttacttatatgcttatggtggcgattcaatcttgcacttagacggaacacgattgattaaagttgtaatctcattcgttgtcattgctttaattgcagtagctattttgcttagtctgagagcaatcaaaaagcgtacaaaaaaagcttgaatttactcaagcttttttattatgcctagcatatttaaactaagttagcttcttctaacagttcttcgacccaagttctcttgattttcttcatccctgttttgagagctaacttctcaggtaatggcatctcttgatcaactaatttcttcttgtcagacatgtagtacatcgcacgaagcaattgacgaatatcataaattgagtcaaatacttcaggtacaccacggtcaacgttaagcaatgtataaacagcttccatggcagttctgacagaatattcggtggtaaagacagtgtctctagttggtgattcggcaaaattgccaataaaggcaatattaactgatccttctggaacaacatctggacggtccccatcatgacgaggcataaagtaactagtgatatatggcatgtaaactggtacggtattcatattttcttcactagccaattcgctgatttgactctctggcacgcctaagtgatagagcatttcctcggcaatttctttaccagtacagtcaacgactctcttcttgatgtaattaccctcagtatcagaatacaaagcataaatccaaacaacgatttgatctggattctggctcttaaagtgaggttgacggtgaatagtaaagctaagttcccaattagagtcaacaacagtgataattccaccagtattaactttaccatcgtaaaggctgcgcttagtcaagcgttcaaagtatggagctattttcttattttccaaggtaactgtagctgatacgaaccaactacgctctggcaagttttcacagaagacatctggatgaccaaagtcaggatcttgtttagccaaattttcccataatttccatgaagagcccttgtcgtgagtaattggtgctggggtattttgatcaccataagtagaactttcagtgattgaaccgttagtcacaaagacaatatcatctggggttaaatcaatatcactttgctcaccattcttggtcatcacgatcttcttggcaaccttttgcttgccctcatgatcaacaaccacgttatcaacgtgacaatcacattcaaattgaacaccgtgatcttttaaatatgccaaaagtggcttaaccatggactcatattggttatacttgttaaacttcaatgcggtaaagtcaggcaaaccatcaatatggtgaataaagcgcattgcataacgccgcatttcggctgctgagtgccatttttcaaaggcaaacattgttgcccagtatgtccagaaattagtcttaaagaagtcatcactgaagaattcttcaattgtttcaccttggagttccttttccggtgtcatgattaacttcacgatttcattagcgcacttacctagaccatattgaccatcacttggtaagcgatcaccgcgattataaattagacggcaattggatgagttaggatcttctttatcaagccaataatattcatctaagtatgatgcgccagggatttccaaacttggaatcgatctgtacatatcccacaaacattcaaagtggttctccatttcgcggccgccccgaaccacgaaacctgcattaggacgcttagcaccatcaagtgaaccaccagctacgggtagctcttctaagatatgaatattttcacccttcatttgtgcatcacgaactaaaaagacagctgcagaaagaccggctaaaccactaccaataatataagcagattttttatctacgcctgcgggctttttggcatccgcaaaagcctcataattaccattggaatagtacataaagatatcctcttttctgtataagtatagtttttaacattacactttaattataaagaaagcggttactagatgcgagttttttagaagttttagctaataactttagaattctttattaattagtttctgccacagttcttgcatatcttttggatcattcaactcaattgttttacatttttgttggctaaatggatccggaaaatttaaataaaagcaatttaaggcttggcgtgaaaacccatcttgaattccatataaaggatcaccatataaggggtgtcccagataagccatgtgaacacggatctgatgggttctaccggtaagcaagcgtaactctaccaagctagcacctgtaacctgatctaggactcgatacgcggtttgagcgtcctttccatctgccactaccgcacgtttaaccccactaccctttttgccaatcggttgatcaattaaaccagttaactcattcggagcaaaattgccatgtacaattgcatgatattttttgacaaatttctccttgccaattttactaaaacgagcatgggaaattgcatttttccccaccaatactaaaccagatgtatatcgatctaatctagtaataacatgcggcttcaaatttttctgtcctttttgggcaaaataacccaacaatcgattgaccaccgcatcatcatcttcatagcgtgagggaattgacaacacacctgcaggtttgttaactacaagataatttttattctccaacacaattgatactggattattcgatggctttaaaaaatcatttttcttttcttcaccactgataaaaatcacttcatccccagcacgcaaattaaagctagtatatcttcttttatgatttactaaaatcatgccatgatggtgtttagcattgtttaacgcttgatgcgaaaaaccattttttaacaaaaaaggacccagctttttggggtctctttcttgcacaattagtttaaataaactagtcatttttttcattatctccaataaacgcattttgtacgcgtgaccaaaaatgatggtggccaaattgatcaaactgaatcgaatgccgcgaaattcgatattcaatcttcttagcattacgtacatcaattcttgctccatcaactgtcatcacaaaatgatctgcattaggaacaatcgaaatccattgatcaggcgcaatcacaattggtgatgacaaagttctaaaaactcgattattaattgaggcaatttcagtcatttgcaacgcttttagccggggatgaattactgcaccacctagtgatttgccataagcagtcgaacctgttggtgttgaaacgcaaagaccatcgcctcgaaagttttcaaataattgatcattaatgtacacatcggcctctaatgtatgtgaaactcttttaactgctgattcattgacggctaaatggtaatgagtttcacctgattcagtgagcatctttatttctagtaaaggatacttcgctggttcacccttggttactgctaaagcatcaaccattttttcaatatcatagttacgccaatcagtataaaaacctaagtggccagtatgaatcccaataaagcgcacagaatctacttgattttcatagcggtggaaggcattgatgagggtgccatcaccgccaacagtgatcactacatcaggatatctagcatcaaagataaagcccttttcctgaagcagcttcttaagctgcgcaactgtctttaacgtttcatcgtagttattatgcgctattgttactttcataatttttctttgcccttatttttggtaaaaattttctgagcttcttggacctcatccttaattgacgacatttcttcgtctagtctataagcggcttcagccgttgattttaatctagctgaaatgtcatcaggatagacaccttgatatttgtaatttaaagtatgttcgacagtagcccaaaagttcattgccatagttctaatctgaacttccgcaattaattttttcggaccttctggtaagtaaaccgtatagttaatcaccatgtggtatgaccgatatccactcggcttagcattttgaatataatcacgctcctcaacaacttccatatcatctcgagcatgaatcaaatctactaccttataaatatcgtctacaaattgagtaacaatcctaatccctgcaatatcttgcatatcagtctcaatgacatcaggactaattactcgccgtttcattttttcctttatagaatcaactgtctttacccggccaattacaaattcaataggtgaatgttctcccttagttaaaaagccttgtctaagggaacgaaatttaacctttaactcgcgaacagcttcgttataaggccacaagaagttatcccaatctaattccatgagaaaacattcctttcttaagcaaacaaactcattttaccatataattaagttaaacagttcggaggaaaaacagatgagtaaaaatcgagaaattgaagcaaaaattcttttaaataaaagcgtttatgatcagatcactgccgcttttccaatcaaaagtgactttacccaagaaaattattattttgatacagcagatgatttattaaaaaatcatcaaattagcttgcgtattcgaatctatgctactcacgcagagcaaacaatgaaggtaccggatcctaatcctgtacaaaagaatttccatgaagtaattgaaattaatgataaattaactcacgctcaagctaaaaaattagtagcaaaaaagcattttaaattcactggtaatattggcgcatatctagataatcattttgccaatgaccaaaaaaagctacatcttttcacctggagcaaaacccgcagaattttgatgaacgggccacaaaactgtgaattaactctagatgctacgtcttatccagataactatcaagattttgaattagaaatcgaaaatactaatcctgctttaattcaaacagtattaactaaacttgaacaagaatatgactttgaacaaacggctgctaacactaatcaaagcaaaatagctcgtgcaagcgctcaccaaaaatagtatatagaaaataaggcatattttttgtcacttattttttttcttgctaaagtaactaatagtaaatcaccaaagaggtcgagattatgtttgagatttttctattcatcaatccaatagggatttattgttatgacactgaaaaacagattcgtaaaaccgttgatgaattaggggtcgacgtttgttatcactatattcccattgcaaatgtttgtttaatcaatgatgatgcgattcgccgacgcaaagatgaccagaagttgcctgatattagtaatttttctagagcaacttatgaagcattagaaaattaccacgcgattaggctggcctatggcaacaaaaaagcccgtcaatacctgtatgaattacaaaaaaacttgagcaaagatgcttcagcttatacacctgagctgcttaagcggatcgcaaacaaattacatatcaaggatgcggatattcaggcaatcaaacaaactgattacctgcgtacttctattgaagaagatcaaaaactagccaaccaatggaatattaaagctactcctaccaccgttatctttaacgaagacaacgagcaaaatggagtattgctagagggaccaatcaatcaacaggatttagttaatctaatgcttccagattgtcaaaagtgtttttcagactatttacctgcggagcatcatttacgccttatctaaaggcgttttatttttgcaaaaaatcactcacccgatctctttcacctgggttacgccaagtagcaaaaactttatcaggtaaatcatcaagagttaatttgcgttcataaagcatctctcctattttcaatcctaactttgttttttgcataatttgctggcgtaaatattttctttgagttgcaatgttcaaagaatattcttttttgaatggcttaaagcgccaaaaatcttttatccccaattcatcaaggacaaatgatttactttgataaaccaatttattagctaccggttcttctaaaacattatattttaagcaaaaacgatttctctgtggattaatttctaaatagtaattcccccaagctttattttgtcgaaagaaaatcaactgtgtgcgtttcaatcgccgtttcaaatagtgtcgctgtcccacaatccaaatatcttttacaccaattttttgataaagctgatgccgatggttaaattcttgttgaatcaacggcgcacattgaacttcaaacgctaacttagcagttgctaagacatctgcacgcaattgtccttcagctaatggaatctcaacttctgccggaaaaccagctgccgtcaaagctgacttcaacagcattttcgattggtgatgctcctctttttcacccattaaattactgtacttcacaagatgcttaaaaaaggctgctttttgctccgacataaccaaaatcacttttttattgcaatgtggacagtgataattatcacgattcaatttcttttgccttgcattaactaaacatgcttcgtcaactgcaaggactaatttcttatttaacatggctgcatacatttttctcacccatgttttattacgtaaaaaagagacggaattttgtcccgtctctttttctttaaagaatcttaataattagctgcttttaaaaagtaatgtcgaatctggcctaaagcattttgcatcaataagcatttgcctgtttcttcaactacacgcatcttatcactatcgaccttaaaaccaaattcgttggctattgtccacgcatctgctggtttaagctcctcatattcttcatcaagaaatgccaaatttaagaaatattgtccatgcaagtaatacaagctagaagctaaatcatttgccttaaggttatcagctaattcaattagactacctaaatcatcaaaatagtaagcctgagtcttgcgcgatctccaatcagttggctcattgtttttatcatcttggttaaaaaagttgtgagtagctggtccttgaggagccgaatttgaattcgtactctcctcatctaaatcaaagaaactttttgaatcatccgaattcgttgatgattgctcatccttaggaaagctatcacccattagtttccttaaattctgtgcatcgtccggcttaactttggtgatcatcaaatctaatcccccattattaggcattacttgaaatgatactggatcaccattggcaaattcatggtcttcatcgacctcatcaagaattttatagaagaagtcttgaatcttttgtctattacctaataaatcaagcattcccatcccacgacgagccaattcagctttatcaattcgaactctgatagtattcttatcaatatgatctacctgcacaggatctcacctccatgaattaatatatctattgtagcgtatttttcgtttaaaataaaagtgttagtctcaacaaaagccttaactaacacttttcaatcattttataaatctgcaatcttttgtgcttcagccaattccaaccgacgaacttttcgtggcaagaatcgacgaatttcatcttcattgtaaccaacttgaagtcgacgatcatccataataattggtcttcttaacaaactaggattcttttctactaaatcaagtaactgatcaattgataaatcgtctaaattgattcgcaattgttgaaaagctcttgagcgggtagaaatgatttcctcagtaccattttcagtcatccgcaagatctttaataattcttttttagtcaatggttcagaaaaaatgtttctttccttgaatggaatattatgtttttcaagccacgctcttgccttgcgacatgaagtacaactaggagagacatataaatctaccataaaaatcacgctcctcagaacaaatatttgtatacgtttctttactcatagctagtataccatataagcttctttttcgtaagtgcttaatttatcgtttacctctgctatttacttaatactaaagataaaacgtgaattatttgtgaagatttcgttcgttttgtttaaaattattaaaaataaaaaaagagacatcacagtctctttttgcaaattaaaactacttgttcaattttttcattaaattattaactaatttttcgttgtcttcagcagtttctgatacataacaagcttcgttagctaattccttaatgtcagcagtgttcaatttcttcattaagcttctgatacgcaaaattgaagttgcactcattgagtattcatcaagtcccattgaaagtaagattgggaacatagtgttatcaccagcagcttcaccacacataccacaccaaataccgttttcatgagcaccatcaatagtgtgcttaatcaaacgaagtactgatgggttatatggttggtacaagtatgacacattatcattaccacggtcagcagccatagtatattgaattaagtcattagtaccaattgagaagaagtcaacttcctttgcaaattgatcagctaaaacggctgcagcaggtacttcaatcatcataccgacttgcaagtcatcaccaatcttaacgccttctttagcgagcttatctttttcttcagctaaaatttgcttagcttcacgtaattctgctaaagtaccgatcattgggaacataattcctaatggaccgtatgcagatgcacgaagtaaagctcttaattgagttctaaagatatccttgtattgcatagaaagacggatagcacgaacacctaagaatgggttcatttcttctggaagatcccagtaatcaaggtgcttgtcaccaccgatatcacaggttctgataatggtttgtttaccattcataccttcaataacttccttgtaggcatcaaattgagcttcttcagttggaaagtcactagagtccatgtacaagaactctgttctgtacaaaccaatggcttccgcaccattatcctttacacctggcatatcattaggtgtaccaatgttagcagcaatgataaatttcttgccatctgcagtaactgatggttcattcttaagcttagcccattctgccttttgcttaaggaatgcttcactcttttgcttgtaatcagctacttgagcgtcacttggatcaataattgcatccccgtcaagaccatcagcaattaacatatcgccgttcttaacatccttagtaattgagtcagtaccaacaacagctggcaattcaagtgaacgagccataatagctgagtgagctgtacgaccaccaatatcagtaacaaaacccttaacatactttttgttaagttgagcagtgtcacttggagttaagtcgtgagctacaacaattacttcatgatcgattgaagcaggatttggtaattccttaccaagaaggtgagccataatacgctttgaaacatcacgtacgtcagcagcacgttcttgcatgtaaggattatctgtcatcccttcaaaaatagcaataaacttcttagcagtctcatcaagagcagcttctgcgttgatctttgaatccttaatttcattctcaatggcaccagtaaattctgggtcatttaaaatcattaagtgtgcttcaaaaacttgagcttcttcatcgcccaagctttctttagcaatatcatgaatcttttcaacttcagcagttgaagtcttaattgcatcgttgtaacgagctacttcagcttcaacatcagcaattgaagatttagagaatgaaagatcaggctccacaagaagatatgctggagcaatagcgataccatcacttgcagcaattccttttaaagtcttggtcattattcagctaaaccttcttttttcatagtgtcggcaattgcgtccaatgcgtccttttcgtcatcaccttcagcagtgatagtaacatcagcattttgaccaacaccaagtgacataacacccatgattgacttcaagtttactgacttaccgttgtattccaagttaacatctgagccaaactttgaagcagcttgtactaaaagagtagctggacgtgcatgaatacctgtttctgcaatgatatgaaaatcgcgtttttccattataaatatctcctttaaattgaaaaattaaactggtaataaatacccattcgagtattagattatcatgtttttacagattagacaactgcaatgtaacagtttacattatttattcatcggtattcgtagcggtatacacaatcgcgccgcctctttctgccctaccggtaatatattgtctttttccataatttctaatagtcttttgaagatcaaacgcatcttttggctcaactttatactcttttatctcacctgagactaattgatctagaattttctgataatccaaaaatatcaccactcttttaaaactttataatttttccactattaattctactatttatattcaattttcaaaaatattaatattttgtttgcggtaacaaaagcatttcttacaaaaaataagtgtttgagtcttagcacttgactaccaagagtgctaataatataattttggtacagttgaaaagaaaggcggtactatattttgctttgccaaaattgtcatgagcggcccgcttctattcaccttttcactaaggttaatggccaaagccgcgaaatagatttatgtcaacactgttatcaagaattaaaaaatcaacaaggaaatcaaggaaaaatgaataataatgaattttttggcgactttgatgatttattcaacgcattaaacggaaataacaacaatgccgcaaacaataataatgaaatgagaaataacgaccctagaatgcaaatggggggaggcgctggtaatggtggtcaaaacggcagaagcctacttgaccaatacggaacagacttaactgcccttgctaaaaaaggcaaaattgacccagtaatcggtcgtgataaagagattgctcgggttatcgaaattttaaatagaagaactaagaacaaccctgttttaatcggtgaagcaggtgttggtaagactgccgttgtcgaaggcttagctcaagaaatcgtagatggatcagtaccagcaaaattgcagaacaaacgaattatttcattaaatgttgtttcacttgttcaaggtaccggtattcgtggtcaatttgaacaaagaatggaacaattaattaaagaattacaacaaaacgacgatatcattctttttattgatgaaattcacgaaatcgttggtgccggtaatgctgaaggtggcatggatgccggtaacattattaagccagctttggctcgtggcgaattgcaattagttggtgctactaccatcaaagaataccgcgatattgaaaaagactctgctttagctagacgttttcaaccagttgaagttaaagaaccttcaattgacgaaacaattcgcatcttaaaaggtattcaaaaacgctacgaagactatcaccatgttcactacactgatgaagccattgaagctgccgcaaaactttcagcacgttatattcaagatagatttttaccagacaaggctattgaccttcttgatgaagcaggttctagaatgaacttaaccattccttatattgataaggataaaatgcaagaaagaattaatgccgcagagcaattgaaggaagaagccttaaaaaacgaagattacgaaaaagcagcctactaccgtgatcaaattgaaaaatatgaaaaggttaaagatcaaaaggtagatcctgacaagtcccctgttattactgataagatcatggacaagatcgtagaagaaaaaacagggattcctgttggtgatattcaaaagcaagaagaaaaccaactgcaaaatctagctgctgatttaaaggctcacgttatcggccaagacaaggctgttgaaaaagtagctcgtgccattcgtcgtaaccgaatcggtttcaacaagtcaggccgtccaattggttcattcctcttcgttggtccaactggtgtcggtaaaactgagttagctaagcaactggctaagcaaatgtttggctcagaagatgcaatgattcgtttcgatatgtctgaatacatggaacaatactcagtttccaaattaattggttctgctccaggttacgtaggctacgaagaagctggtcaattaactgaacaagttagacacaacccatatagtttgatcttgcttgatgaaattgaaaaagctcacccagatgttttgaacctcttcttgcaaattcttgacgatggtcgtttaactgactcacaaggtagaacagtttcattcaaggataccatcattattatgacttctaatgcaggacaaggcattaagaacgctagcgttggctttacagcagaaaacgaagatgaagctaatgaatctgctagaaataatatgagccaattctttaagccagaatttttgaaccgtcttgatgatgtaatcgaatttaatgaattgactaagccagacttgcttaagattgttgacttaatgttgcaaaataccaacaatatggttaaggatcaaggcctacacattgatgtaactgctgctgcaaaagataaattagttgaagatggctttaatcctgccttaggtgctcgtcctcttcgtcgtaccatccaagaagagattgaggataatgtggctgatttcaaacttgatcatgcacaggctaagaatttaaaagccgatgttgttgatggtaaaattgtaatcagtgatgaagcaaataatgaataggatttaataaaagacaaagtccaagttataccaaaagatttcgaagcaatattcgaaatcttttttccctgaattgtcaaattaagtgcaacagttaggctatgaggaaatatattgcttgaagagttcttctgctgtgtgatattggaggattcggcgatatttgtggttaatggcatcagttgcctgttgaacataagcttttgacttgtctttcatgctcttgcccttagggaagaattgacgcaaaagaccattgcagttttcattggtgcccctttcccatggagaatatgggtgagcaaagtaaatctggcagcccttgatcttggtcatatccgcaaactcagagccattgtcaaacgtgattgatttaaaccaggcaggatgtctgtcaatctccttttgaagcagcctttggcatgtgcttgcccgatagtcaggaatcttgataactacttcaaagcgtgtggttctttcagtcaaagtcattaaagcaggctgattcttgcgtctgacgcctttaaccagatctccttcccagtgcagcggagcttttctgtcttcaatctctttaggacgctgttcaatggaattgccaagatgcttcttgtgcaaagcgtgaccgccatggctgtgatgacgcttgttcctgcgtcttttgagcttcataggcagatcaatattgcttatgtccagcaagccctgatcaatatagcgatagacagttggtgtgctgggacaagggtagcctggcatagtccttttgaattcaccaacgaactcatcgatgctggtggcatcaaatttagctttaaagcgtctggagagcattctcaaaaagacagcataatgcttcaatggattgcgctgatagcagtttttgcgacgcttctcataataaatctgtgcagtatcagcgtaatagtgctcatacaataaatagctgctgtctctttgcaggacacttccgcgtttgatttcgcgactgattgtcgacttatggcagccgacttcttgagcgataacagtacgggaagttatgccggaatccagcattgcttgaatttgtccacgttgtacgctggttaattgatgatagtgcttagaaatgctagaatttgaattggtcataaagatcttcctttcttgatttttcgtcacttcaagtttaggtcttcatggcctttttgtttaacacttagtgttgcacttcaattttaaatccggggaaatcttttttcttaaaaataaaaatatgctactcaatttgaggtatactaaattagaagaagtaaagctaacagaaacaggtgaattccatgcatttaattgatgtaaccaataattactctgatttggttcacagtcagctcaacactaccgatgcaaactatgttaaagtttattctcttggtaatacttcagttatttatactgaaagtaaggattctatcggtattgcacttgaaaaccatgaccgtcgtgttcgcgaagatgagattgaattcgtaatcaagcgtttaattaaagattatgattcttcatacactttgactgtagacaagagtcgtcatgtaatcgaaattcacgttgacaagtaatccaaatattgttgtatcaaaaaaggaggattgattcattcaattctcctttttctttttgctttaaagtttttctgttaattcaacatctggatatttgtcatggaagaaacgttccgcaaattcattttcaaataagaataatggattaccataacggtccttaactaataagttacgagtattagacatgcgtgggtcaagctgttccggatcaatccagcgcgcaacacgatgaccaatactgttcatttcaacttcagaattatattcattcttcattctgaattggaacacttcaaactgcaattgaccaacagcaccaagaatatactcatccgtttgataattgcggtaaagctgaattgcaccttcttggactagctggttcatccccttatggaatgatttttgcttcatcacgttcttagcagttactcgcataaataattcaggtgtaaattctggtaatggtggataaacaatcttgcgcttaccagcataaatactgtcaccaatttgaaaattaccagtatcgtataagccaactatatcgccagctaccgcatcagaaacttgtactcgctcgcttgacatgaattcagtcgcattatttaaacgaattggcttatcagttctagctaaagttacgtccaagcctttcttgaattcaccagaaccgactctaacaaaggcgattcggtcacggtgatgaggattcatattagcctgaatcttgaagacaaagcctgaaaattctggatcttctggacttagctcctcatccccattaactgtgtgactctctggtgctggagccaaatcaacaaagctgttcaagaatgtctcaaccccaaaattggtcaaagctgagccaaagaagacaggagtttgatcacccatagcaatcttctcgcggtcaaacttgttcccagcttctttaatcaaatcaatttcatccagagtatcctggaattgaggatcttgactaagtggctcactatcaggcaacttaccatcttgatctaatggtaaaaagcgatcttgatcatttttgcggtaaagctcaacacgattattagcgatgtcatatagaccctttaaagtttgacctgaaccaattggccagtccattgctacaccctcgataccaagcaaatcttccaattccgcaattaaatctaatggtggacgtccatcacgatcaagcttgttcataaacgtgaaaattggaataccacgttgcttaacaaccttaaacaacttctttgtctgtggctcgatacctttagcagagtcaattaccatgacagctgagtcaacggccattaatgtacggtaagtatcttctgagaagtcctggtgtcctggcgtatccaaaatattgatacgtttgccttgatattcaaactgcataaccgaactagtaacagaaatcccacgcttcttttcgatttccatccagtcactagtagcaaaattgccagttttacgtgccttaaccgtacctgctttacgaattaccccaccaaacaaaagcatttgttcagtaatcgttgtcttacctgcatcggggtgagaaataattgcaaatgttcttctcttttttactttatctgctaactctttgtccattagtcctcgctatcttcttccttttttgattcatcaatcgttaataataccgtcaacaagcgtgaccccttcatccttctagtggtcaaagtcatcccatcaccaatatcaactgttaacttttctcccttagctggaatcacttttaaagtattgatcacatagcctgctatcgtatcaacatcttccatttgaagattagtaccaaattgctcattaaaatcatctaatggcatcttaccgtaaataatgtacttatttgtagctatttgattaaaaagaatctcagtgtgatcaacctcatcatcaatatcgcccacaatctcttcaaccaaatcttcaattgtagctaatccagttacaccgccatattcatctgtcaaaattgctaattgtcgttgcgtttgctgcatttccatcaacaaatcgcccagctcggcagtttctggtgcaaacagcggctcagtcatgacatctttatagtcaagattatcaaaacccttttgtttagcctttcgtaaaaccgttctgatatgaataatccctacaatcttatccttatcacgttgataaacgggaattctagaatatggctcacgaaggatttcatctagattgtcttgaaaactgacttctcgatcaaccatgaaagcatccgttctaggtaccattacttcacgggctgtcttaccctgaaagtccaaaataccttctagcattgaaaattctgtatcatcaattttatgactttcatgtaaagtaacaatttctttttctaaatgatctttagtccccacttttttatcgccggataatctattttttaagcgaccaaacagagttcccgctccaggatcactattcattttcgtactctctttcttaaaaaagttatctaaatatagctattatagcatagagccaataacaattatgttaaaatagcacataagactaggaggttcgtcatgaaaaaaagtcatgtcttactcgtttttacatttcttttgctaattccctatatctgtagcttagctattattggaatcggctataatgcattagttttacattcagctgaactttatcgcacattaatcggctcattagttggcgcaatcattatgtttgctgtcaaggctactattcaacggcctgttgatttattagctgttcaaaccaacgatggcttactgaagcagcttttacgtttcttcagtatcagacggcgctactggcttttagcagctaatattatcttagactttgttctttgctttgctgctacctacataatacgtgctcttttaacacttgatcaaatcgtaggcggctccatcggctttgttttgttaatcatgtttgtttcaacttgtcttggcgcttatgttgaatacgataacctgtcaatcgaccctgagcagcattaattacttgctggccttcaagtacattacttgggccagtttttttgtatccatgtcaagatcccaagtaatatatggcgtgtcactgtcacccaaattttcatgtacttcaattccgctagcaactacttttttggcaaaatttggcacggtactagtcaacggtaagttgaaaaagactaaagtttgattctcttctacttcctccgctacctctgcagctggtaattcaaacttcattaaacccgttggcacttcatcttttgctacatctgctaaaacgccataccaatacataaagctgtcctcacctgataccactaggacagaacgcttattttctaaattatgatcagctaaaaatttttgaaaagtttcatcattttccatttgctgattagcttccataaagctcttttgagcattcatcaaaccagctggaaatggacgaccaataaataatcttgattcaatatttttcttcattttttctcctaatattctactaattcgtctaaatcaattatttcaccgtttaaaaaggcatcaatctcacctgatgaaaaaccgtgactaaacaaatatttttttattttaaaattgcgttcaatttctggaagatttctaaaacgcttgtaagccttaattccttgtttcttcaaagcttctgtttgtgcattctcatcttctttaagatccattgcatcaataataacgttactaatcccgctatcaaagccatgcgttaataatttagtacgcatcttacgctctaattcacgttgtgaaatcttgccaacttgatggctcatcgacttaatcacgcgttggcccacttcgagccaatcttcttcatcaatttcatctaacttatcctgactaatttcaggatcaacgcctttttgcgtcaactttcgtaataaaattttagggccatcagagccaacacgcaaatcatttttgataaacagcttggcatattgacgatcatcaagatagcctaattcattcaattgactaacagcactattggctgcttcatcagagatttcgtgtttttttaaatattgcagcacctcaaagatggtccgaggctcgtaactcaaaaaatgagccgctaaatcactagccttagcatcagcatcaaattgcctaatcttttcaacctgctcatcatttaattctttacctttaagcagcacaaattctgccaacgttttctctccggcagaaaaagcatattttccatcaataaaaacattatagcgacctggccgtttttgtgcacttactttggttatgatcaacttgtttcacctcgcatatttttctacatccatgctagcaaattttgctaaagcttgctaagaactttttccaggtagtacaattaattgaacacaatttagtttttagtagaaagaattaacgatgaacagaaaatttacccataataaaccaaaacatgaaaaagacgtcatcatcactattaaacgtttaggaattaatggtgaaggaattggttactacaagaaaaagattatcttcattcctggtgccttgccagacgaagtagtagttgccaagattgttaaatcatatccacactacatccaaggcgaactggttagaattaaagaaaaaagtccagatcgcgtagacttccctgaaggtgttgatcccgagattggtggcttagaattagtgcacttgtcttacgacaaacaacttgaattcaagaagaacaatatgcttgaatcattacgcaagtaccatcctcgtaattacaataagtataaagttaaaaatactatcgctgctcctgacccatggcattatcgcaacaaggctcaatatcaaattgaaaaagatcatggtcaacttaagcttggactttttgctccaaattcccaccgcttgattgacttaccaaagatgccaactcaaagtgaagatacacaaaaaacggaacgtaaaatcaaggttttaattgaaaaattgcatgttcctgttgccaactatcgtcgtcatttacctggcattaagaccgtagttgtccgtcaatcagaagcaactaaggaaatccaggtaaccttgatttcgatcggccacaagattaagaacttaatccctcttgctaaagaaattatgaaacttgatcatgtagtttctgtctatcagaatgaaaccgaatggcagaatccacaagtttggggaaataaaaccgaaaagcttttgggcaagaatcaaatcaccgaagaaatcttaggtaaaaaattcgccttatcaccacgtgccttcttccaattgaacccagttcaaaccatcaatctttactcagaagcattgaaatacttagacctaacccccgatcaaaccttgattgatgcctatagtggtgttggtaccttaggtattttggcagctgaccgcgttaagcaagttgttggaatcgaaaccattccagaggcagtcaaagacgcacaacataatgtcgagcttaaccacatcaaaaacgctgattatattcaaggcagtgttgaaaaggttttgccagaattacaaaatagtggtgttgcaatcaatgctttaatcgtagacccaccaagaatgggcttagctaaaagcttgatcaaaaccctcttgcgggttaaacctgaaacttttgtctacatctcatgtaatccctcaaccttagctcaagacttagttttacttagcgaggcatatgatgttcgggtcatccaaaatgtagacatgttaccacaaaccccacgctgtgaggcaattgctaagttagtgctcagaaaagatagataaatccaacaacctagtcttgggctaggttgtttttgtatataaaaaagcggctactggacaatcctgtcccttagtagccgcaatttcaagtggatgaggtagctcatcaattgatagtcacgatttttagttgtttggtatgtatttaaacaatggcattatcgcaaccaatattaacattcacttgttcgggtctttacataaaatgtaacttttaataaattggagtttttgcgaacagccaatgataattaatcaaataatttttaattaagctatttatggctgacacctctacgtatagagaatctttcaagtttccaataataatacaattctggagataaaaacttacttatatttttttatagttgttaacttttatttctacctcttccacactattcattatatctagttgtgaaaccgtttacaagaactaacccatatatttttgcaaaaatctttctacttgttgtcgatattgctttggatacattggataagacaaagcatgccctgcaagtggcgcaagccaaatttgcttttgagcagctgttgccgcataattttgccagaccatcttagttggcacaaagtgatccttgccgccatgaataaataaaaatggtcgcgtatttttatttaactgagcaaccgcagaagcatcttttaaataaaagccatttttcactctattaattccactaaccaaatcaactattggaaaccgtggaaaagccttcatatgaaataaattttgagcttgatagttaatttcacctttcacggttgaataaccacaatcttcaataaaagctttcacttgtggtggcaaaagcataccgcttaccatcattgccgttgcaccacccatgctttgacccataattacaattttggcatttgtaccagtttgatcaattacttgatagatccaacgcaaaatatcatctttttcagcccagccatagccgatatacttaccttcgctgcgcccttgggcacgtgcgtctggaacgagaacattataaccaaaatcataaaacattttggcaaaaccagccatactatctccatcactcataaagccatgtaataaaattgcggttttttggcatgtttatcaaggtactgggcgaacaaagttatgccgctatcagtttttaaagtccatgttttcttagaaaaatctctaaaccaaaccttatcacgataaagtggatccttgcctgataattctttggagtcagcttttttattaaacggtgtcatcgccatcttgaaaaagtactcgcttgccgcaaacaagccagctccagcaattaatgcggaagacaataatagtttctttttcatcttttaacacttccaaattcaattatttcacttttcattttataattaaattgctgaaaatttacaatccttatgacttaattatactgaaaaatgcgcttaacagacttgcttcaattaatcgatgacctgaacctgaatactaaattttatctaaagcatgatgacaaactacttaagtggggaaaactcactattgccgaaggaaaatgtctgctgctacccgggcaaacagcaatgaccaaacaaaaattgattaaattagttggccgcatgcgtggtcgcggcatccccttgttaatggtcattgaccaaaaagaatattccattttcggcctacagattcgcgaagatactggacaagcaattttaatgtaaaaagtgtctgggaaaaaactaagtctcagatcatgaaaaaagaacgttgaatttttgtttcaacgctctttttgtatacttttagctccagccttgatattattaaatcatcacaaaataaaaaaggtggaaactaacatgtacaagaattatatcacaggtcaaactgctttaacacttaatctagattttgccattccggccaatcatttggctaatgtcatcagctggtttgtagattcaattccagaagatgttttagtaggcaagactgctaaaacgggccgcccagcctatcatccagccatgatgctcaaaatactgctttttgcttactccagaagagttttttctggcagaaagattgagttgatgctggaagaaaatctgccaatgatgatcttggctgaccagcaaaagatttcatatcatactatcaataattttagatcaagcagccatgccaatgaactgattaaaaagagctttatctacttcactaacctgttagaagatgaaggcttaatcaatgaaggtgctgcttttatcgatggtactaagattgaagctgatgctaaccgctatacatttgtctggcgcaaagcggttgaaaagtatcatgaaaagctgaaaggccaggcagttgaactttatgatgaattgattactaaagaagtagtcaaagaaatggaaaaagaaaaagttcaaactagtcaggggctaaaggaattagctcaagaaactgaagcagaaattaacaagctgactaaagagattgagcaggaaaacaaagccagtcctggcggttcacctcgaaaagccaagcgacgtggactaaaaaagattctgcaccggctaagaaaagattatgtgccaagaatgcaaaaatatgaagaagccgaagagatctttgccggacgcaacagttattccaaaacagatcatgacgccacctttatgcatatgaaggaagaccacatgaaaaatggtcaattaaagcctggctacaatattcaagcagtcacgaccgatcaatatgtagttgattatgccatctttcctaatccgacagatttcaaaactttggagccggttttggatcaaatgaccgtgttggacaagtttgacaaaatcgtcgccgatgctggctatggcagtgaatacaattattcgatgctggaggaaaaatatccagacaagaagtactttattccctacactatgtatgaaaaagaacagaccaaaaagtataagaatgatccaactaagctaatcaactggtactacaatgaaaaagatgattattacattgatcatcatggcgtcagattcaatttcaaatattacagccagcgcaaggatcgttctactggtcaggtccgtgattttaaggtttatgaggcagacgagttccagctaacgccagaattggaacaattggctaaaacagctagcggccgccagcgccaagttcgctataatcctaactggcaatatttaaaagaaaaagcaaaagaagttctccaaagcgaagaaggcagacacatctatggcatgagaaaatatgatgtagagccagttttcggacatttgaagaacgtatttggcatgcgcagaacgcacctgcgaggtaaagagaaggtcgaaaccgatatcggaattgcctttatgatgatgaatttgaacaaatattgtcaaagaaggtggctgaagggccgatttttattgttaaaaattttaaagagaacaaaaaaacgatcaagattcttaaaaaaggaaatcttgatcgtttttattcatctggaagctagttttttcccagacactttcttattcttttacgcggtattgacgaatatgatccttagtaccagcaaaataccaagtacctacttcatcgtcgctagttaattctaagccatcctcaggatctaacaaagccgtattgaagacgtcttcatattgcttaactgtcagcttcttccgccgatcaagcattgcttgatcagctgtaggatcaacttgtttttcatatccttcaaccaacttgccactataaaactcagccattgcacctgaaccatatgaaaacaggccaattaatgagccagcaggtaattcaccattctctagcaaactaagtaaactcatataaagtgaagcggtgtagatattacctactcggcttgataattgtttagcagccgcaaaactacgctccaacttgatcattgttgcttgatcttgcccctcaatcgcaatattattagcttttaagcccatcttagtaaaaggtaaatgataagtaattgcatcaaaatcactagtctttaatcctttttgcttcttataatcagtaaaggtcttcttgaagaaatccaagtaaacttgagtcgaatacttgccgtcaactaaagcggtgcgagaataatttggtctccagaagtcgttaatatcttcgctgtaagctgaatgaccattatttagggctaaaatgcttgggtcagctttgatgagcattgccacgctaccggctccttgtgttacctcaccagcagtattaacaccatagcgagcaatatcactaccgatgacaattgcggtttgttcaggatgtacccgaacaaaatcacgtgccatcattaaggatgccgttaaaccaaagcaagcttcctttacttcaaaagttcttacttctggcttcaactttaaggctgtttttacaaataaagaagctgactttgattgatcaatactactttcagtcccaaaaattaatagaccaactttgttcttatcaatcttgtcaataaactttaaagtcgcattaattcccattgaaactgcatcttgcgtaatatccgcaacactcatctctctttgaccaatgccaactaaaaacttattttgatcttgctttcttgcgttcgccaaatcgaccatatcaacgtacttgtctggcgtaaaaagtccaatttgatcaatacctacttgcattatttttgctaaaagctccttagcatgactttcagaataatttttttcactaatcatcgcagctagtagctgcttgcgctcatgttcattatcggttaactcagcaaccacatttctcgcctgcagtttcatatgtcctgcttgaatgccaacagtagaaattgccagcaaagctgctaggttgttggctaaagccacgctaacaataatctcagctagagttttactcgtgattttttgtcctaaaatagcaaaactttgttggacgtcatgacgggccttaattgagccaccaactactccgatcgccattggcaacgttaattcgccaactaaataactaccctgcatcgtccactttgataaactgcgatattggccatcatgattggctaaaactgcagtggctgcttcaattgcccgataatcattgcctgtggcgattaagacggcgtcggctccattcatgattcccttattgttagttaccgcacgataaggatcgtcaattccaatttttcctaatagagcaacacgttgtgcaacttgcatcccaccaatcgtttgtggatcaatcttcactttagccgtggccaattggctaggataatttgataaaatcgcaaataatttttcatcaacaccagcataattttctaatttagccgctaaaaattccaaaatcgagttggttttattcgcgcccatcgcctcagctggatcaaccaatacttttaagtaaagcaaatcctctttctgcacagcagttatttttctagtaccaccaccatgacggactaagctggaaaacttttgattagctaattcgactaagtgcggaaattctttttctaattcaattaatgaaaaagaattgttgaccttcaaaacgatttgaccataaatcccttgtcggtcgctgctagctgtcacaccaccatttctagcaaagatactagctccatgattggcggcagcaactactgagggttcttcaacagccattggcacccaatatttttgtccattgactattaagttttgtactacgcctaaaggcaaacgcaactgccctacaacattttcactcaattcatctagacgtctcagaaccgcatcatcgatttgctctaatgcaataccttcatcctgcaataatttacgtctagcttcaggctctaattgataaaatttcattctgcattctcgatttcataagcaatcgcctgaccgccaccaatacacaaagtaaccagggcacgtctgccttttctcttctttaatccactaattgcactagcaactaagcgtgtacccgttgcacctaaaggatgacctaacgcgattgcgccacccataatattcaatttatcagttggaatttgtaagtcgcgagctaccgctacactttgggctgcaaaggcttcatttaattcgataatatcatagtcatcaaaattacgccccgtcttcttaagcagttttttaactgcataatatggagtataacccatcagtgcaggatcaaagccagcttccgcaaattcacctaacttggcaatttgcgttaagcctaactctttcattttctccttagttgccagaactaacatacttgcaccatcagtcaaaggagacgagtttccggcagtcacttcaccatccgccttaaaaacaggctttaagttactcaatgcctcaagcgttgtatccggacgaattggttcatcatgatctaaactttgaccatcaatctccacatccaggatctcattatcaaaaaatccggatttaactgctgcagctgcctttttatgcgactgcaatgcaaattcatccatatcctgacgactaacatgatatttttctgctacgttttcggcagtaattcccatatgcttgccagaaaaagcatccatcaaaccatcgttaagcatagtacttactaggtgatctgctggatcatttttgttttcttttttaacaaaataaggcgcattagtcatgctctcactaccgccgacagctactagatccaaatcgcctagttccatctgtccttgagctagacgtaaagctttcagacttgagccgcagacttcattaattgtaacggctgcagaagcttcactcatccctgaatgtaaggcaacttggcgagccatattctcacctaagccggtatccaaaacattccccataaacagtgcttgaacatcagctggcttaatattgcccgccttcattgttcctttcaaggccattacacccaaatcaattgcagaagcatccttaaaaaatcctcggtacttgccaaaaggtgttcttttagctgcaacaatataaatgtccttcatatattttctctccattctccataatgtgtattttttaacaaatatgataatagcaaaaaaatattaagaaaaacataaaaagactacgccgcagcgtagtctccctaataattaagcttattttttattttgcttaccttcagcttcaaacttcttgctcaattgcatgatatatgcccgcaattgttccttaatttctgggtgcttcaaaccatattcaattgaagtttcaaggtagccttctttgttaccaacatcatgacgttcgcctttaaaggcatgagcaaagacacgttgagtcttgttcattgtatcaatcgcatcagtcaattgaatttcaccgccacgacctggtttttggttagccaaaatatcaaaaatttcaggtgttaataagtaacgaccaataatggcataatcactaggtgctttatcaatatcaggcttttcaacgaatgacttaacattgatcagtcctggcatgatctcattttccggttcgatgacaccatacttagaaacttcttcatgtggcacaggcataactgcaattgtagaagcatgcgtcttgttatagcgatcgatcaattgcttggtcaatggcaccttatcttccattaagtcgtcgcccaacataactacaaatggttcatccccaacaaaactgcgagcacggaagatggcgtctcctaaacctgctggatgcggttgacgagtgtaatacaagttaacgcctaaatcagtaattccttcggttaggcgaagcaattcttttttacccttttcttccaaatcttgttctagttctggattagaatcaaagtgatcttcaattgggcgtttgttcttgccaattacaattaaaatatcttcgattcctgactttttagcctcttcaacgataaactgaattgttggtttatcaacgataggtaacatttccttaggtaaagccttagttgcaggtaaaaatctagtacccaaaccagctgatgggataacggcttttcttactttcataaaagcacactttctatttcaattttataagttcatcataacaaaatatgcatttttcagctacttagtttttcgtcttttcttttgaatataactggcaatacgaccagcagaatattcaacttgtccaacacggtttcgcacaatagcagcgttaacaccaacgccaaataaaaataatactgctgcaatattcaaccagagcataaagatgataaacgtaccaacaatgccataattctcccaagtaatcgggaaatggtgtaaatagaaactaaaaagaaatgatagggctaaccagcctacaacagttacaaaaactcctggccaaattactctctttttgagttttatattaggcaaaacatagttcaaataccataatgctagcatcataaccaatattaatactggatagcgataactaaagattttgctaatttcattaagtggtagctgaaaaatcggtcctaaaaagttgagtacttgttgcccaaaaaccaaggccaatgtagcaattgtaaatactagaatcatcaatcctgtaaaaacaaaagtaatagttctagtccaaagaaaattaagcattgataattttaattcaacttgatgaaccccataaagtctattttctccaagacgaattgcattaaccatatttgataatgaccaaactgcaaacacaataccaaaagaaatatagcctgttgatgtcgttttcaataaagaatttataattggcataatgaattttgacacttggtctggaaaaaccaagttcaaatattcagcaataggcgcagtatcaatgtgaaacaacggtaacacgttaccaatgataataataatcggaaaaatagaaaacaaaatgtagtaggcaataataattgaactagcaaatatctctccttgagataaggtggttcgtaatgtagaaataaattgcccaatttttaaaccaaaatggtttttaccatttttcatccattatcctaatcatccatctcatcaaagtgagggatgtacttttctaagccatcgtaaggatgctgcagggtcaagatcttaggaccatcttttgtaattgcaaaggtgtgttcaaattgagcagcattagaaccatctggagttgcgtagtaaacccaatcatcgttaggatcatcaacagtacgttggtcgatgtgccagtcgccaccagcttctaccataggttcacaagtaatagtcatgccttcacgcaagcgaagaccatgacctgccttgccccagtgaggaacttctggatcttcatgaattgatggttgaataccgtggccaattaattcacgtacatcaccgtaatgattttcatcttcaacataatgttggatagcagcaccgatatcaccaattctgttacctaaaacagcttggtcaattccgagatacattgcttttttggttacttcaattaatttcttatcagcttcggaaatttcgccaactggataagtagtacatgaatctgattcataaccgttcaagttgcaagttacatcaaccttaacgatatcgccttcctttaagatgcgatcttttcttggagtttggtgggcaatttcatcgttaaccgaaatacaagtaccatacttataaccctcaaaaccttgttctgaaaggcggccgccacgacttgatacgaagtcttgacaaaactcttcaattttccaggtagaaatgcctggcttaatcacatcacgtaagccttcaaacatagttgcaagaagatgtcctgaagcttgcatgcctttaagttcacgaattgatttaattgtaatcaaaataatttctcctttataaatttttatttagtttcagatatttctattataccgttttccaaaatacttttaaaaggtcgggtttttgtagaatcaaaacaaaactctagaaatacctgaaatatttttaaagtttgctaaaactaaacgtttttgcaatagtttcatgtataataaggtgtcgtataatgcagtgaaaggtatgaaaaatcatgaaagcaagaattgtttatgccagcatgactggtaacgatgaagacatggctgatattttagaagaagatcttcaagattatggctttgacgttgaaacaagtgatgtcggcttcactgatgccaatgactacttagatagtgatctttgcatttttatcacctacacctatggtgaaggcgtaatgactgatgaattggcagacttttatggggagttaaaagacttagatctaacaggcaaacattttgctgtgatgggttctggcgataagacctacggtgaacacttttgtgaaaatgtttttgactatgaaaaagcattcaaggattgcggcgcaactgaaattactaaacccgtaacaattgaaaatgcgccagatgatgatgcagtcgctgcaatcgatcaagctgcaaaggaaatggccgataagttaaatggctaataacaaaaaagacgtcacagctgttgatcaggcacaaatacgccgtctaggtcaaaaattaatcaagcgacaccgtaatctttgggtttacatggttttcggctttgtcgctgcattaatcaataccttagtcttcatggtcttacactcatggtggcataatgtgatggtaatttctaacaccatcgccttcatcgtctccaacctggcatctttctggtttaaccaaaaggctgtttttatcaataatgtcgatcatgaacacagcacgtggcataaactaatcgtctttttcacttatcgcgtcatcagtttaatccctgatacattaattatgttagtcggcttatcctggctgcatttaaacgcattactagtcaaaattatcgaccaaattttagtcggtgtattcaattacttaactactagatcagtctttcaaaagcaagaacatactatgattgaacgtgcaaaaatgcgcattcaagaaccaaaaaataaaagagacagcaaaaattaaacaatgtcattaagttaagacattgacaaattatcgacttggacttttaagatcattcatttgcgatttatcgcatttgaatgctcttttttcatgccaaataaacccaaatcttgtttagaaattaggctacacgatataaataatatacagctgatttgggtttgagatttcttttgtcttttcgtcctggtctgatcggaattgtgtaatgactaatttgaataagaatctttttaaagatttcagttgaagaagaaattatatacatagcctggatgacaaaacatgactgtttgaaattgatcgcatattgatacttgcattttttttgtggtacatatgcttgagcatcaatttgactgactgcgttaaacataatcatgtgggcatagatctccatttcaataaatctatcctgcttggaatgaaactgtacgctacctaaagcatatttcaactttttgaatgaagtttcaatgccccagcgcaaatggtagatttctttgatcctttttaagggataatcggctctatttagattagttagaacaacttcccattcttctttgcctgatttaggatcattaattctaaatttacaggcacgaaattttattgtacataactctccaaagtcccagctgccatctttggtatttttagaccgatattttatatattgacggtaatgatggttaaccaaatgaacgttttctgtagccttatgggtttcataataataattagaggtagtcacccagcaagctatatccttatcacactcttgattaggcaactcagctacttccttaaatgcgccatatcccgttttagtacgtatgacataataacagttaggcaggcgattacaattttcaatcatgttaaagccggtataacctcgatccatagtaactatatatggtccgcaatttagctttttaagcatttgaacggcggctttacgttcatccatctttgacttaggctgaaagatgcagtcttgataagtattatttaacaggtcatagagtgcattaacatgaatttggcaatatggctttcctttatgattgagatttccaacgatattctctgatttaggattccagatttgattaaaatcagacccatcaatggcaaatatacgatatttatgatcaaataactggatattaaataaattctgattaaatacagttagaatatgcttaaaacatgcgggtgaaagctgacctttgcgttggacataagcggaagtactgactactttatcgttatttttaatagctttttggccaaaagctctaaacaactcactggtcaaatcttttccttgcatattaatagtagttttaatgactgtagctgcatctaaaaaccgcttcctagtgaaggcatgaggatcatcgataaaatcatgaatatgctttccagtatcattgataatttgatcaagacgatctaaaatatttctgtgaagggctttcataattaacaccagctttctggcaataattttgaaggtttaataatttaatcagagggcgaaaaggtaggttcttttcgcctttattttatgcaaaaaaagaaccaaatcataatgattcggttctacagagattagattcaatttgtcaatgtcttaacttaatgacattgaaaaattaaaactgtctctttatttttttactcaaaatcttttggtttactttcactatcttgattaaagtaataataaatatcatccataattcgatcagctgcatgtccatctccatatggatttttggcattcgccatccgatcatattcgtttttgttttctaacaaagctagcatttcttcacgcaccttgtcgacttcagttccaactaacttcaaggtaccggcctttacgccttcaggacgttccgtcgtatcacgtaaaaccaaaactggtttacctaaactaggagcttcttcttgtacgccacctgaatcagtcatgataaagtatgaacgtttagctaagttatggaaatctaccacatcaagcggctcaatcaaatgaatccttggatcaccaccaagcacttcattagccactttttgtactcgtggagataagtgaaccggataaataatttctacatcaggatgcgaatcaattacttgccgcattactttaaatactcggcgcattggctcaccttgattttctcgacggtgcatagtaaccaaaatcaccttattaccaggagtaattgcgtccattacctcatgatgataatcttgttgtacagtctgtgctaaagcatcgattgccgtatttccagtaacgaaaataaaatcagaatggtgattttccttcagtaaattagccttactcaattcggtcggtgcaaaatataaatcggctaaatcatccgtcatctgccgattcatttcttcaggatatggtgaatacttattccaagttctcagacctgcctccacatgtcccaatgtagtttgctgataaaaagtagctaaagaagccgcaaaactagtcgtcgtatcgccgtgaaccaagacaatatctggtttctcttctttgatcaccttagataaatcaatcatcactttagaagtaatttcttctagagtttgattttggtgcataatattaaagtcataatctggtttaattttaaaaatatctagcacttggtccaacatttcgcggtgttgtgcgctaacgaccgttacttcttcaaaacgatcatctttttttagtttcaaaacaagtggtgccatcttgattgcctctggacgcgttccaaaaacagtcattaccttaattttcctcattaaaaaattcctccgcttaactattttactatacctgattttagactatcttgcacccgctttctgtgttttaatggaagtattaaattgaaagttggtcgatgcatgaattcatcattactattattaattacaactggtttaattattttgattggaactttttgccttgtttttggtatggacaaaaacagacccgctaaaactagaaaatatttactttatactgcactaatctgtgttttcctagtttggggcttaattactgcaattatgcttcaacccttaggataataaagataccttttggataaccaaagcatgtaaaaagcctgcaagaccaatacttgcaggcttatttctatgaccccggtgagattcgaactcacctctacggtttaggagaccattgttctatccagatgaactacggggtcaaacctaagattaactttaccaaaaaaagtggtaatagttaacctttttttagaattgtggattaaaaaatgttttcggatggttggtatcagcaatcttatcagctgctttaacaaaaggcatccaaattagcaaagtaacaatcatatttaaaatgcttaaaacaattgcacgccaatcataattgcaagccagaaatgggccaataactggtggcatgatgctaggtactgccacttgaactggattaaccaatcccataatgctaacccaataagaaaaggcaacattaactagtggcgctaatacaaatggaattagatacactggatttagcactacaggcaggcccaagagaattggttcgccaatgttaaaaattcctggagctagtgagattttggcaattgtgcgataatcactgcgtttagaaaacattaaaatcgccacaattagcattaaggttccaccagcaccgccaaaccaggcaaagacatcaaatgagccacgtacccatacatatggtggaatatttccattactaatcgctgtgatgttatcattttgagcagtcatccaaattgaatccaaaattggtgatagaacccctataccattaattccaaaaaaccaaaataactgcactaataaagtaatgacaattaccgtaccaaagccttgtccccactttactaatggagtttgaattgtggtaagcaaccaatttccaaaatatttaccggtaagaatttggaacaaataattaattccgcctacaccaaatattgcaatcattgcaggtaataaagaatcaaaagcagcttgttcagcatggggcaagttcgatgtcacatgcaacataatccttgctttatagcaagcataataaataaaaaagcctaatgagccaaacaaaatagcagtaaagaggccagtagttgagaactgactaatgtcaaatgcattatgcagtgtaacattatcaccatgaaatttaatcttagctatattggcaatgcttagtgcaaaagaagataatgccacaattgaagcagcaagtctatttccttcaaaagcttttgctagttgatagcctaaagccaatgctaagaaaaaggcaaataatgaaaatgttcctcgccaaactaaattactgattgctaccaatggctgtatcgcaaaagcaaaggcataccagcctaaatgatcatgagctgcttcaattaagctcttaattaaaactgctaatgatcctgccattgtaattggcattaatgagacaaatgcatcccgtaaagcaactagccatcttatctgaccccatctactagctagcggcaaaacatagtcctctagccatctaactaaacgaatcatttctttcctttcaagtaatgtggatgatatcccttgttcttattacgtttcttgcgttttttagttttatttttcttagtcgaagtcttaatgggctgctctttagcctgcttcttttccttcttgagtttaggcttttcagttgttaaatgatagcctgcaaagtagacacgctctatttgtaattgatctgccaataatttcttcaaatcacgaaaatcgtgatcatcgcctaaggtaaccacataaccttcagcgttcattcgacctgttcttcctgcccggtgcatgtaagtattagtctcgctcggaatatcaaaattaatcacataggtaaggcctggaatgtccaacccacgcgcagccaaatccgttgctagcagcaatttcgtcttaccagtagctaggtcatttaaggctttttcacggcgttctttaccaaattcattagctaataattcgaacttagtcttagtatgcccaaaaataccagcaaagcgcatcatcgttttatttgaatcaaagaacaaaattcccttaaagtgatccaacttagtcattcgctgcaaaaattcaatcttgtgttgattgtctacttgcaaaaaataatgtttagtcgctgaagcttgttcatttctgacatctactaacaagaaatgacggttaaaaacttgctccgcatcccgtgtaatctcagaatctgttgctccaaataataagatttgactgtctggacccagattttgccctaatgctgataacaattccattttagtaaattctaaaatatcatcggcttcatcaataatcaaagtcttgatctggtttactttaattcgaccacttgagaagaagtcaaaaaaacggcctggtgtagctacgaccacttcaggatgctttttcttcagattgtcttcttgtctctttctattgccagcaccaaccaagctgacgccttttaatcctaaagcgtggatgtaaggattaattgcatgacgaatttgtacagctaattcagtcgttggcgcaataattaccacgctgttagcattacctggctgtgctttttccaaactaggaagtgcataagccaatgtcttacccgtacctgtcttagccaatccaaccaggctcgcaccattgcgaatggcatcatagctttctttttgaattaaagttggctggtccttgtgttctctaattaaaacttgtttgattttttcttgatacattattactgtgttaattgcccatacttttgcttatattgaccaacggtcccgttatacgcgtacatcgttacctggctttctaagcctgaaacattccttacgcgtccgttagtagtgtagcaccaaaatgaatactttaatttattcggtgccttactatctgatgacataaataacgtttgcggattaaagtaatgttgatatttatgatcaactttcaccatgactcttttgccagctgcttgcaataaagccgcaaactgccccattgaccgcaaatatctcgctgaacgagtagtcactgccggtacaattagaattggcagcgagcccgtattttgtcctacttgcttaaaaaaagtagcggtaatgctgcatcggagtcgattcattgctataggaaatctcactaccaaatgccaagttcgttcctaaaatttggtcacgataagacagatagttttcatcaaaatatgatctgccttgggttgctttcaaatatataaaggaaacgccattagattgcaatttatgtaaatcaacatagtcaatatcttgatttaactcaatcccaatcgcacttgaattagcatctggcggtaaagttgtttgccgcttaaaattgaaaaagccaatcaaaagaaatgcaatcgccagaattaataaagtcaaaatcgctggcaaagtatacttatgctgaaatcttttcatcggctaaattcctcccttaattattttaaccgaaaagcctatcaatacaaaaatttccgagactgtaaaatagtttgtgtaaggatgaatgattccttaaatttatttctttaaacattagaaaaaggagttcctttctcgtatgattggtttgaacaaaaaaaacacatacagaaagaagaactccttcatgaatgattttaccaaagattttgctcaagctctattcaatccagacaaaataaatgatttattgcgcaaagagctacaacaggctgttaataacttgctagaagctgagttgactgcctttctaggctatgatccctatgccagaaatggctggaatactggcaattctagaaatggtgcttatttccgcaaggttgatacccagtttggaccaattgaagtgcaagtgcctcgagaccgcaacggtcagtttcatcagcacacgctgcctgactacaagcagcactctgatgttttggaaagcacgattatcaagctctactccaaaggcgtaactaccagagaaatcgctgacttgattgagaaaatgtatggcagtcattatagtccagctcaagtatcaaatatttccaagcagatgctccccaaggttgaggcttatcacaagcgcaagctaagcgacaagtttttctgtgtctatttggatgcgacataccttcctttgcgccgagaaacgtttgagcgtgaagcagtatatattgccattggcattaaacctaatggacataaggaagtcattgactactgcattgctcctagtgagaacattgaagtctggacagagatgcttcaaaacatgaagtccagaggcttgaagcaagttgaactctttctttctgatggtgttgttggcatgaaaacagccttggccaggacttatcctaaagctcattttcaacgctgcctggttcatgtcatgcgcaatatctgtgctaaagtccgggtggatgaccgcgaaaagatcatgaacgaattcaagcagatacatcaacagacaagcaaaaaagaagctgcagctgtcttgcacaaattctatgccagatggaataaagcttatagccatgtcatcaaaggtttgaaggaaattgagcccgatctgctggtcttctacaattatcccaaacaaatcagagcttcaatttattcaaccaatatgattgaatcctttaacaacgtcatcaagcgtaaagctaagcctaaggcagaatttccaactgaacagtcgcttgatgcatttattggcatccaggcaatgagctacaatgaccgctatttcaaccgaattcataaaggctttggtcaggttcaggataccttagaatcttattttgaataaataattaaaaaatcaatttacgagaaagaactatttacacaaaagatttgacagtttcaaatttccagtcgatgtgctaaaatttaaataatgtaaacgaagggcaacaaataaatatgaaacgacaaatctcatttggccaagcattggctaccgtagtcggttctgtcatcggagctggcgtatttttcaagatcggaacaattactgcacaaactggcagcacttcaatgaccctgtttgtatggattttagctgggatcatttcaattgcatcaggtttgaccatttcagaaattgccgccagcttaaaaattaatggtgccattaagtatcttgattacacttacggccgcgtgtggggttttctttttggctgggcacaaatgattgtttattttccagctcaaattggtgccctaagctcaatttttggcgttcagtttgtctccttatttggaattaaggcgaggtattctaacctaatagctatcttgctagtgctttttctcttaggaattaatctaatcggaactaaattttctagcaaaatgcagtcggtcatcactatcctaaaaatcattccaattgctttaattattatttggggattatttaatcctgccaaaatacctgcaccaattattccgttaacagtcggcactggacattcatttccaaccgccattagtcaagggttactttctgcgttattcgccttcgaaggctggattgtagtgactaatttggctaacgaagtcaaaaatccagaaaaagacctttcacgggcaattattttaggtctttcagcaattacattgatttatgttttaatcaattatactttcatgaccgttttacctattgatcaattaactaataacaataatgccgcgtttcaagcttcaatgaaattgtttggtcaatttggtggaaaactagtcactgtgggaattttaatttctgtttacggtgcggttaacgcattcatgctgacagggatgcgcacgccttatatcttggctcaagacaatttattgccattctccaataaaattggcaaggctaatatccataccggtgttccagtagttggcgcgtttattgttgatgctattgcaattgtcatgattctactaggtaattttactgttttaactgacatgctagtcttcgttatgtggactttcaacacaatgttgtcagttgccgtaataattttgagaaagcgtgagccagaattaaaacgtccatttaaggttccatggtatccgatcattccaattatttccgtgatcggtggtatcttcatcgttgtctcaacaattatcaatcaatttgttctttcaattattggtattggtttaacattgttaggactgccaatttactattacatgcaaaagaaaaataattaacgaaaaaagccgccgattttgggtgactttttatttgagtaaatatatttcctgaattgtcaaattaagtgcaacagttaggttatgaagagatatattgcttgaagagttcctctgctgtgtgatattggaggattcggcgatatttgtggttaatggcatcagttgcctgttgaacataagcttttgacttgtctttcatgctcttgctcttagggaagaattgacgcaaaagaccattgcagttctcattggtgcccctttcccatggagaatatgggtgagcaaagtaaatctggcagcccttgatcttggtcatatccgcaaactcagagccattgtcaaacgtgattgatttaaaccaggcaggatgtctgtcaatctccttttgaagcagcctttggcatgtgcttgcccgatagtcaggaatcttgataactacttcaaagcgtgtggttctttcagtcaaagtcattaaagcaggctgattcttgcgtctgacgcctttaaccagatctccttcccagtgcagcggagcttttctgtcttcaatctctttaggacgctgttcaatggaattgccaagatgcttcttgtgcaaagcgtgaccgccatggctgtgatgacgcttgttcctgcgtcttttgagcttcataggcagatcaatattgcttatgtccagcaagccctgatcaatatagcgatagacagttggtgtgctgggacaagggtagcctggcatagtccttttgaattcaccaacgaactcatcgatgctggtggcatcaaatttagctttaaagcgtctggagagcattctcaaaaagacagcataatgcttcaatggattgcgctgatagcagtttttgcgacgcttctcataataaatctgtgcagtatcagcgtaatagtgctcatacaataaatagctgctgtctctttgcaggacacttccgcgtttgatttcgcgactgattgtcgacttatggcagccgacttcttgagcgataacagtacgggaagttatgccggaatccagcattgcttgaatttgtccacgttgtacgctggttaattgatgatagtgcttagaaatgctagaatttgaattggtcataaagatcttcctttcttgatttttcgtcacttcaagtttaggtcttcatggcctttttgtttaacacttagtgttgcacttcaattttaaatccggggagtaaatatatttattaatgttgtgaagcaccgctagttgcatcattttcttgatgatcttcataggcagtattggcagcaattcgaccaaaagtgaaaatatctgccaaggagttaccacccaaacgattaccagcatgaatgccaccagcattttcaccagcagaatatagaccatcaataatttgaccatctttattcaaaacatgtgccttagtatcaattactaagccgcccatagtgtggtgaatagcaggttttctcggagtagcatagaatggtgcaacttcacatttgaggcctaatacattcttatggaagtctggatcctcgccacgatcaacgtaagaattataatcctggatagttttaaccaaaactgctggattcattccaatttgttttgccaaatcttcaagcgtatcagctctaaacaaggttccagccttaacttgcgcatcaagtgactcttgggttgtattgtaagcagtgtccttaatcttatcgtccgcaatttgataaatcaaaccaccattttcgataactgccttagccaaaacatcccgttccgcaaattcattaacaaacctcttaccctttttgttaaccataatatagttagcaggcggagttacaacaccagtgaaaagctcaccggtctttggatcagctactggcattaattggataaagcccataccgaataagtctgcaccagcttcaagacctaagttaatcccatcgccagtaattgcaggtgaattagttgttgtactatcgtactatcgtctgcaatgtttggccaataggtattgtatttttgaaccatcttagtattggcaccaaagccacctgccgttaaaattactgccttagcatgcacagtcaaagtactaccgtcagcgcgtgtcgcaattacaccgcgtactttgccatcttcaataattagtttttcaacacgagtttcaagatatggatcgacaccatgctctcttatccaatcacccaaaacgtgaataaaggcataacctaatggctctactggcttatgacctctgcgccacaaaccaccaactggttctgtaacttgagaattatcaaacttaacacccaaatcttggagccatttaacagaatttaaagcattagttaccaattcatgtaccaaagcatatttaccatgaatttcgttaccttttaaatcagtccttttaccacctaaataagtttgaatttcatggagtaaagtcgaatcaaataaataatctgtaccagaatcaatatattctttgatttgtctttgtaatctttcaaaatcaaagcggtattctaaatcaatttgttcaattggcgtattagccaagtcttctaaagtctgtttttcaccaggaagagccttaaatttactttgccattctggttcagccgcattcattggaccaccagcacggctagtattaccaccgatctgtggatacttttcgagaacagccaccctttcaccatgttgaattgagcgaactgcagctgctagaccagcgccacctgcaccaactacagctacatcaacagtaatttcttcatcttctacctttgtagcagcgggcttttcacggtttttccattcggttgaatcgccgcctgcttcatcaattgcttcggctacgccatcaatcacaccatgactggaaatagtcgcgccactgaccgcatcaacgtttaaagtttgattttccacaattgttttaggcaaacgtctaaatacttcatcggctactcccttagtttcacctgatgaatctactttgattgaagtaactttatcgccatcaatgtcaacttccattggcattgattcggaaccatgacctttagcttttacttgatattttcctgacttcattgcttacacctctaataagtttaattttatccacaagttaatattagtgcgtcatctgttgatgtatcaaatatcaatttcactatactttcataataaaattgttatgagataactatgtttcgttctccaaataaaaaaagcttaatgcaaatagttatccacattaaactttttaattgcatgatttaattaataaactgaaacttgaaagctaagattaacgctccttccccgcgcctcttggctttttcttatcaaaaataaaaacgcaggatctctctgcgttatactttaagtgtcaacctgaaaagtaaaggagatcctacgcaatgaacagtatagaacaaatcgacacagaaaacgataccaaatccttaatttcttcatttattaatctaattggtctagctaagttgactaaacaagtcaactttaagcgtaaatctaccgtttcattaaccatgattatctcttggctgatgtctgtacattttgctcggctttccttattcagagctaagagtgacaagcgtttttccgttagaactgctcgcaatgtacttaacgatggaagaatcaactggcaaaaactattatgcttgattgcagctcggctcattggctgcttcaaacatccgtaaaaagaaacattatctttattcaagcatagttgaggctcaatatcatggacatatctttttattaaagctcgtttttgtctccaaccgtggaaacaagaacaagtatttagttttagctactactcagacaaagcttagacctaaagaaatcatccaactttatggtcgtagatggcaaattgaaacatattttaagacgtataagcaatatcttgctttagataaatctcaagttcaaagctatgatggacaatgtggctatatcgcagttacagcaataacttatgatctattggcctggcaggaaagacaaaatacagatgataagacaatcggagatttattctatctaatgaacgaatccttacctgatattagattcgtagatgcattggtctacttaatttcagaattaaaagagcttaaacagaatagttttgaaaagatagatgaagtaatcaatgactttattaaccaactgccacgattcatacaaattgcactgaaacagatcatataaaaactaattacgtctagaaaagctcaatagtgacaggacttgagcttgattttggtgctttcaagtttcagtatttaaattaagcttcagaggcgcctgatacagcatctgcttcttgttcatttgaaacagtaaaataattataattggtattatccgcagcagtcgtacctgcaacaaaaccagaagcatagctccaagaattcatcatacttggcattgaatcatgaccattagcaccaccaacaatttctcctgcagcatagaagttacttacgggattcatatcattgtcaagaagctgcatttgatcagtagtttcatatccacccaaagttgtgcagaacagaagtttttgttcaattacataatatgtatcgccttcgaactcatgcataaacttcttgtctctaccaaactcaggatcataatctgctttaacatcttcagtatagttatccacagtttccttcagcgtttgataatcaatacctgctttttctgccacggtcttcaagtcgcctttgaccagaactggactcttctcgccaaccaaatcaaagaatgattgaacctcttccttggtaaagccatacttaagcattaattcatagaaacggtcccaggttctttgatccatgacaatgtaagctaccttacccttttgttcagcaatcgcatccctaaaatgcgtataaggtgcagattcgttaactattctcttaccatcagtattaacaaaaatagcccccatatcggtcgcttctttagttgaataagttgttagcttagcaataccaggttcaacttccaatccatgtggatataccttataccagtctaagttacgagtaaccaaattcatatttttggcaaaatcaagataatcaccagttgaagtcattggaccataatatggaatatcagtcttatgagcctgataatcacgtgcaccccaaccaccagcagctaaaacaagtgacttgaaattgacattaattgtctggtgcttgccttcagcggttaaagataccagtttgccagccttatctttattcaacttttcaacacgggcatctaagataatttgtccgccctttttttcaaatgcctcagccaccttagtcactagttcatatgagctttcactaggcatttcaatttgacgatatacactatgttcaactgtttgggtttccgctttttgataagtcaaatttgcaaattcagtaataaagtctactgccttcccaatattgttagctaatagctttgacaacattggataattagtaccgcggcattcacgagtaatatcttgaactagtctatttggcgaatccttctttgccgtttcaccaaataattctgcagaaactttagagccagttcctacaacatttgagccatttaaaatagttgctccacctaaatagccatttttttcaagtacaactacttttttacccatcgaaagagcacgacttgccgccattaacccggccataccggagccaattacagccacatcaacatttagttgcctttcttcatgtacgacttctggcttttttccgtcaagagcaatgttattttcggctaatgcttttttaccagaatctagcattgcttgagtcatcaatgatgccccagaaacagcgtccacgtcaaaactttgattatcaataatatttttctttaatttaccaaaagtttgattaaaaattgcaggagtttccgaattcttggttactttgacatcactaattttattgttttctaagtcaatctcaaaatcaatttgaccattgcgaccatctgcttgagctttaatagtttgtttggtcataaaaactactcctttacttgttctttttactaaaccgcttatattataaccacaatattaaatctaaaaaataaatttaatttgatattttaatagaatttttttatcaaaagcagtaaataaaagcgagtgatcattctcactcgcttgattctttatctaattttcatccttatttattagcgtaatgttgaataacttctggcttcaataccccaacataaggaaggttacgatacatatttaaaaagtccaaaccataacccactacgaattcattgccaacctttgaaccataatattctaattcaacatcggtagttcttctggcttccttatttagcattgcacaacacttaacgctcttagcgccacgtgccataatgtgttctttcatgaatttcaaagttaaacccgtatcaacgatatcttcgacaattaaaacatcgcgatccttcacgtcagttaccaaatctgatactatcttgaccttaccagttgactcaaagccatcaccataactagaaacatcgagaaaatccagttgatgtgctacgtccatttgtcgagttaagtcagtcaagaagtaaattgcacccttcaaagccccaacaactaccggctttttaccagcatagtcctcagttaattgcttacctaaacggacgcacatctcatgaatgtcatcttctgtgaataatttgtgatctataatttggtcaatattgtcgccttttgccatttaatctacccttcaattcaatttacatatattattcctaataaaaagaattataacatctttaaacaaaaaaagcgacattttcaacgcttcctctgaataatttctaattttcatcctttgattgatcgtctttttgatctttatccttaatcggttcaacgataaaccagcgcataaagccttgttcgatactgtctaaggtaaacttatatccttcaagttcaattgattcaccctttttcaagttaggataatgttccatcatgtaaccaccaatggtaataatatcgctatcttgaaaggccttcagatctgtatggaagaaacgctcaaagtcatataaagtcgtcttacctgaaacatgaacttgaccatccttgtccttgataatgtaatcatctgaaacatcatcaatttcatccttaacagaaccgaaaagctcttcataaatatccttatcagtaacgatcccactagtaccaccatattcgtcaactactaagacaattggtgtgtgcttagaaatcatcaagtgcaagatatcttgaattggcattgattcaggtaccgtgataatagttctaataattcttgttactggtacgttgccatcaatttggctttgttgcacaatgtcgtacgcataaacataacccacaacgtcatctttatcattatcacgcacaactggaaaacgactgtagccttcttccaagtattttttcaaggcataggcaattgtatcagttgaatcaagtactgacaatcttgttctgtcagtcatgatgtccttagcaaccttatcgtttaattcgaaagctctttccatataagttaagtcttctttatcaagcgaaccaccatgaaccgcattacgcgacaacttgatgatttcagattgtgaataaacttcattttcttcatcagctggagtaaagcccatcaattttaagattccattggagctagtatttaatagccaaacgaatggataaacaatcgtatggaaaatatgaagtggcgtaacgatccccatcatcatcggtactggcttgtcaatcgcaatattcttaggcacaacttcagttaagacaacttccaaataagttaataaaactacgcctaagattgcactaactgacttgatgagtgaatcattcattggcgtcaaatggaaaagatcttccaagatggttgcgaatgtatcagccgagaaccaacccaagactacaccaaccaaagtggtaccaacctgagtagttgacaaatactcattcaagttgtgcgtcatatgcaaagcacgacgcaactttttcttatttccttgacccttagcaagcatatcttcgagctgacttggtctagtttgaactaacgcaaattccgcagcaacaaagaatgatgcaacgataaatattaataatgttgcaactaaattagttactatttgagctggactcaaagtattatcacctttttttacaaatatattactaaaacctattttaccatttcttgcctaaaatagtgcagttttacacaagggataacggttttttgtaatttattcgaccaccttgtaaatttcattaaacggtacacgctttggaataaatttaggatcattaatttcagcattcttgtcgatatagccaactgcaattgccattccgacagcttcatcatctggaatttgggcatattctctaaccaattctgggtatgaaaccattgagtgagctggcatcacacctaagccacggttaatggctaaaagcatgatactttgtgcaaaaattcctaagtcaaaaacggaccaagctggagatttctttggaaccgttaaaaagataattgctggtgcattgaacattgttttattcgcatcattaaataattgaagcttatttctgaaaaagaaactttgggatgcacccatcgtagccatattacgacttggataagtatcccagtctagtgatagcattgaagcaaaatcttcatgtgcagcttctttatcatcaatctttttagctgaagcagccttaaacttgcttaaagcatcccccatcaaaacatatgcacgccatggctgagaattaagcaatgaaggtgattgctgtgccattttaacgattccagcaattgttttttcttgtaattttctattagtaaacttccgcgttacatgttccttttcataaacatccttaaaattcatttttcctcaattcctttttgcttatataataacaatctatattttattatagtaaaaaactgttaaaaagcttaattattgctcttttcttgctttttcttttctgctgcctgtttttttaaataagcactcattgcaagatcattttttcgcatagcaataaacgcagtaatggttaaagttaatccgccaagacaaatcacaagtaagccaatcggaaacaagaagtctgctcccttaggaataaatgatgccttaattacccagcatgctataccaattaacatcaaaactatacccacaatgactgccttagtgttcggtcgatatcttttcataaatgcccttctttcttaattaacattctaacagaaaaagcttagcttcaacgtagaagctaagccgaaaactagagaaatagtcgttaaatttttacatgagagaggggaaagttgactatttaagttcgatagtttgtactttttgggaatgttcaacactgcctttttcaatcggagtaactgacttaatcaggtccatgttggtgtagacaacgatgcagctgtcatcgtatcccttgtctgtaatcatttggaaatccattgtggctaaggggtgacctttcttaactttatcgccttgactaacattcactgtaaacggagcaccttttagttcaacagtatcaagacccaagtgaatcaaaaactcaataccttggtcattcgtgataccaatagcatgtttagttgggaagagtgtagaaatactaccatcaactggtgcatagatatgattatccttaggcttgatagcatagccatcacctaacatcttagttgagaagacatcgtcttttacatcagtaattggcataatgtcgccgtcaactaccgcatctacttcaatacccttattctttttcttaaagaaattaaacataattaataacctctggatttctaaaattcaagtaataatatcaacataaagcttgcgagtaataaaccagctgcagtaagtgaaattgcgattattactcgactaacgccatcttgtgtcttcttcaaagctcttgctcgataaaaacctaagatagctaatactacgcaaagcaagttgccaacaaagagctgagcaatcatctgacttcccatcaagaagcgataagtctgtcgattgattaaaaactgcttgtggtttaacaacatatagtagcctagtatgaagtcaacgatagcaacgattgtactaatcgcaatcatcggctgcttcataatcatcatccgaatcgattgaccagaagcaccgcttcgtagtgcaatcatcgcccaaaacaatagtggagcaatgaaaagtacgtatgaataccaagtcaaaatcttcttagtatccaagtgcatgctttcggttattcgatcgataaagttgccaacttttcgtttactaattgcccacattgatctctacatcctctccttgactctgttgccaagctacatattcactaattaccaaatcaattaagaagtacgctggggtaaaggcaaccttcccgctcttaaagtcggcatcatcagtaaaggcaatcgttggaaaataaatgttgtgctgcactaatgaagctaatttattttgcttcaggttagtgaacgaaacatatttgaatttatcattcactagttccaacttagtgatttcctcattgatcgttttattatcacccgtaaacgagataataaacaaaacatcgcctttttgagcaaagcgtcccgcagcttttaactcctctaatgctgatggcaaaacagttgcatgcttgccaactacaaacaattcatgagccaaatattgtgcgattaactcttgttgccaaccagtagagtaaatgtaaattgtccctgcattatctaaatcgcgatacaagctattgaaatcacgttgtttgaaatacttcaacacgtctgaatttactttactaagttcccgcgcaaaattattttcaattttgattggtttttgcttcgattcggctaattcgaccaaatcaaatttaagctcactgtagccacttagtcctagctttttacataaccggaaaattgcggattcggatacataaagctttttagctaatttggctaagcttaatttgctacagtctctcggattatttagaacatattgaactatctgtttttcagaatcattcaacttatgactattgtcatagaccattgatctcaaatttgccataatacctgtgcccttatcaatatataatttatatattaatgataacacaaacgctttcagattatagcaattgtttcatttgatcaacaacttgatcggcatccaatccgacaacgatgtcaacctcgttgttatctttatgttgtacttcgtaagaatctgcgatcttcttgaattctgaatctggagcgaccttcttaggatcaacgacatgagttcttactctagttgagcaagcaatgacatcttgaatgttggagtcaccaccaagcaagtcaacgataccagtagctctttcaatataaggattatcttgttcagttgataccttagcgtcgccaccttgttgttgcattaaagtgttcatttcatcaagaacttgaggtacgtccaaacctacgataacttggatagccttaccgtggtgtacgacattgacagccttgtttgctttaaatgcggcatctgaagcaactttatttggatcggcaacagatacacgtaatctagtagcacatgaactcaattctgtaatgtttgaaggaccacctaataattcaaggtaagcagttgctctttcaatgtaagggtcattagcgtccttaccagcagcttctgcagccttcttagccttgtattctttctttgaaagaaggtgaacatcttgatcatcggcttcacgacctggagtaatgtaattgaacttctcgatcatgatcttgaagacaaagtaagtaataataccgaagataataccaacgataaattccatcacataggtcttccagtggttttgccaaagtggaatccagttcattgaagcgataccgatcgcaccatctgacatgaatcctcttaaaccaaaggcccacataactgtgttcatcgtggctgacaatactgagtaaactacccaaagaactggagcagcaaacaaataagtaaagtcgataggttcagtaataccagctaatactgaggttaaagcagctgggataagcaaagctgaagtttgcttcttcttgttcttcttagcagttgcgtagaaggcaagacagataaatggtactaagaataccttttcgttaccgtaaagttggaatccttcaactgaagcgatttgtgaaagtggtttagtacttgcagcgtattcagcaaggtgtttcaaccagtatggttgcaaaccgccggcaacaacggctggaccgaattggaatggaatgtataccaagtggtgaagaccagtaggaatcaatacacggttcaagaattggtaaatccaaacaccgataaatccactatctacgatgaagtgttgcatgctggtgatacccatttgaacttttggccagccccagcaggtaatgagtgctaaaggaatcattacgaagaatgctaaagcgtagacataagttgaaccttggaaagtaccaagccagtctggcaacttcttatcaaagtacttattgtgtaaccacactacaataagagcaacaaccaaggcacctaagatactagtgtcaagagtcttgataccagcaatgttagttaaaccatggttagtagcgttagcaacaatttggatcttgtcaaagttaggaataccaaaagctgcaccccagtgggtaagcattgcaccgatgaagtagttgtaagtcaagtaagcaataactgcttccatggctgctctacctctagccttgttggctaaaccgattggcaaacctacagtaaacaaaataccttcttggttgaacactgtccaaccaccagctgaaattgtgtcccaaactgagttccatgtagttcccgggttggcaattgaaccaaacagagtcgggttattgaacaaactacctaaagctacgacaatacccgcaaacgagaacagcataactgggacgaacatagcggccccaaaccgctgtattttctgcatcataatcgtttacctctgaagaaaaaaattaaatcaataacttattcttacatctacacctgcatctacatctttatttcatcagatcaagtcaaccgcaaggtgctcatacaattgacttttgccatttgtgcttcacacaaatatttactcctcaaaaatgttttaagataaaacgtccagttgatatcaaattctgaacttaactctatcttagtagctagcttacatttttatttataccatagttttaagccaatgtaagcgtttttttaaactatgacttattgtttcataaagttaagatgatatttcatttcatgaaatttatttcagcccttcaatgatgtatataccaatatttatacccctttattttgcttgtcgcgcctatgtttaatcatttactttacatacaaaaataacatgttaataaatatgctatagacattctctatttatacacataaaatcctctgcaatatatttcatttcatgaaacgaaacaagtgataaaacctttttcctttccaagatgaactactttgcttactgaaataacacaaagtctggcataattaacggtaagttaaatgcacaggaggaattattatgacaatcaaatttattgcacttgataccgacggtaccttgcttaattcaacaggtaagattttgcccagtacaaaaaaggcagttaaaacagctttagaccaaggaataaaagttgctttatgttctggtcggccagtcgcaggattaaaacattttatggacgaattaggaattattggacctaatcaatatgctatcactcttaatggcgcaattacccgcacagcagatggcaagataatgactaaagatctagtttctaatcgactttatcgtaaaatgtatgcttttgctaacgagcatcatttaccttttaacgttgtttcccctgattcaaaaataattacaggagatcatgatgttgatttaatggtttatactcaagcttacgaaaatagtgcgactttataagatgaattgcctagtgattttgaaattgctaaaggttgttttgccactaaagctaagttgttagaccaatgggaggataaaattcgccaagaatttgggcaagagctgtatattgttcgtgccgacgattgcttcttagagctacttcaccctaatgttaataaaggaaccggattaaaagaattaactgaaaaacttggcattactccagaagaggtcatggcaattggagacgaaagaaatgatattaccatgtttgactttgctggaacagctgtttgcatgggtaatggctccgaagaagcgaaaaagcatgctgattatgttaccacttcaaatgacgaagatggcatcagcaatgcttttgagaaatttttatgaacaacctaaaacaagtatctgagaagtgattaatctttcctagatacttgttttattatttgttcaaatattcacgcaaagctggcaaaactttctccgcctcaactcgtccgacctcatacactcgtcgcatctcttttttatctgtttctaaagtgccaatttcaagcggaaacggtggacgaataataaaagcttggtcagcagcttcatcttttaccatctgatcaagcaccgcattataatcctcagctctagtagccaatttttttactactgcggggtatttccttaaaattactttttccagtggatagagcttactctgctttttgcgataagacttcggctgtgtagcaatgactacctttttatcacagttttgctgctctaaaaaatcatacggaattgaatcagatacaccgccatcaaagtaataatgcccatgaattgcaactggatgagcaaaaaatggaatcgacgacgaggctctaatccactctaagtcaacataacctgcatcatgtaattgatgataaaccggctcacctgttgcagcatcagttgcaacacaccaaaagtccattggattagtcataaatttttctttatcaaaaacatccaacttatcaggcaaaatatggtaacaaaagttagccgcatacaaattgcctgaccgccgccataatttccaactagcataatatggtttccccgcaaagcgcatgttgtagcgcaatactcttcccttttgctccgacttcaagtttacgccaaaggcagcaccggctgaaacgccaattgctaaatcaaaggttatgtcattttctaaaaacacatcaattacgccagctgtaaacagcccacgcattgctccaccttcaagtactaacccacttttcatattttccctctttatcaaaaaaagacctacgcttttcgcataggtctaatttattcttattttaattttacttcaagcccgaccattgccattcagttacttctggcatatccttaccattgtcacgaatgtattgatggtgcttttcaagcaagtcatccatgtgactgatgaagtccgcattcttgccctttagcttatcgatgctttcaaccgcatccttagccaaatcgaagcggtcaaggtggttcaagacacgcatatcaaatggagtagtgatatcaccattttcttcatagcagtgaatatgaacattgtagcgcttgcgagcaaaccagatggattccatcatgctcttgtagccatgccatgcaaagattactggcacatccttagggaataatctgtcaaattcttcagttgaaagaccattcttgttgtcctttggatccattaacttcataacatcaactacgttaatgtagcgaatcttgagatttgggaacttcttatgcaaaatatcaattgcggccaaagtttcaatagttggctcagtttcagttgaagcaaagacaacgtctggcttaacgcccttgtcagttgaagcccaatcaatgtagcctaagcccttgtctaccaacttcttggcttcttcaattgagaaccattgtggacgaggctgcttagaagttaccaagacattgatgcattctctgtcttgcagtgccttgtcgcccactgccaaaagcgtattagtgtctgatggcaagtattcatgaacaagatctggacggttcttttcatacaagtgagtcaagatgcctggatcttggtgagtgtaaccattgtggtcttgttggaatacagttgaagttgcgacaaagttaagtgatggataatcatgacgccagtattgttccttagcttttcttaaccacttcatgtgttgcgtgagcatggagtcaactactcggccaaaggcttcataagtagcgaagaagccatgacgaccagtcaaaacatagccttcaaggaagccctcatcttggtgttctgacaattgtgagtcaatcacacggccacttggagccaggttttcatcatttggttcatgaacttctggttcccattggcgcttttgatcatcaagcaattggaacaagcggtttgatttagattcatctggaccaaagccgcggaaagtagttgggttgagcttagcaacttcatccaagtacttagcccattcaaccatgtcttgggcttcaactgaacctggcttgtcaaacttcaaagcaaacttgcggtagtctggcaagttcaagcgcttaggatcaattcccccattagtaattgggttcattgccattctatggtcgcccttggcagtgttttcagtcacgatttccttaggtgaaccgtcttcattaaacaattcttccggcttgtagctttccagccaatcagtaagcatatcagcgtgttccatgtcatcttgagcaactggaattggaatttggtgggcacggaagctgttttcaattgggttgccatccaagtccttctttggaccagtccagcccttagggcattggaaaataatcattggccaatgtggcaaggtagcatcattgttttcacgggcatgcttttgaatagccttaatttcttcaatgacttcatccatggtcttagccatttcttcatgaacctgcattgggtccttttcaccgtcaaaacggccacccttaaagactgaaacaaagtgaggatcccagcccatgccacggaagtattcggttaattcttgatcgctcatgcgagaaacaatggttgggttagaaatcttaaagccgttgatttgcaagattggcagaactgcaccatctttaattgggttaatgaacttgtcactaaaccatgaagcagctaagggaccagtttcagcttcaccatcaccaatttcaacagcggcaataacatctggattatccaaaacagcaccagtaccgtgtgaaagtgagtagcctaattccccaccttcatgaattgaacctggagtttcaggagcagcgtgagaagcaacaccgcctgggaaactgaagcgtttgaatagcttagccatccccttttcgtcctgggtaatctctgggtaacgttcagtatatgaaccatcaagatatgagttagaaaccattacctgaccaccgtgacctgaaccctcaatatagaacatgttcaagtcatacttcttaagcacacgattcaagtgagcataaataaagttctgtggtgcaatagtgccccagtgaccaattggcttaggcttaacgtcttctgcaaccaatggggtcttaagaagagggttcttcatcaagaacaactgaccaactgacaagtagttggctgcgcgccaataagcatcaacgctctttaaatagtcttttgagtcataatcaactgccatcttattctcctttgagcatctaagagtgctctttttcatttgttcttttgtttacacttatatcataccaaattatctaaaaagttcaactatttttataattggatcctaccaattaaaaaaataagtatttaatttaaaattgcatcccttttttgttgctatatcaaccttttaatgctttgatataagtatttagttgcttaaatactgataagtacagataaacaaatatcaaatactgacataatcagtgcaaaattattcattcatgttagattactaaatggagggcatgagatgacccaagaagaaagattaatacaaattaaacaattacttaaaaaaaagcaccaattatcaactagacagattgcagctcacttcaatgtatcatttgatacggcaagacgagatgtaattcatctaactgaaactggtcaagcaattagagttcatggtggtttgatggaatttaattgcaacagcgtacctgattttttagcaagaaatcaagtacaatcaccggttaagatgaaaatggctagaatggcaaagagatttgttcatccaggtcaatgtgatttcatcggttcatcaactacgttaaagcagctctgtccaatgcttaatggtattgacatgcagatcgtcacgaattcaatcgacaacgcattaagcttattagcaatagaaatcccatcagtcagattgttgggcggcgttatcaacaaaaagcagcgtttcatttattctgaaacagcattagaaacattgcgtcaaatccatttcaatactgcatttattggtggatctcgaatcagagatgacggcgtatatacaccaagcatggctgattccaaaattgtcgaaaccgccgctagtcgcgctaatcaagttgtattagttgccgaaaaatataaatttactaatcaatcctcttcgccatacatgtctgtccccctcaatcagatcgatgtccttattaccgacaccccattgcctgaggaattaaagcatcattttaatccaaaaacgcaaattatacctgttttaaaggagtgatagttatgttcagtctctttaaccaaaagaaacaaagcgaaagtcgtgaagtataccaagatttgaagaatttttataatagtttttttagcaatatctacaatgaaatgaatattggtcgctatcgacagattcgcgatgcaattgggcttgttcttaataagttcgacagtggtgatcatcctcttgaatacactagcaaattggtcatgtatattcaggctcgaattgccatgaatcacctgcatctaactcatgaacagcaagacctaatgaaaaagctaagtgacgctaccaaatatgtaaatctttcttatgtttatctgagtccgctcacttcggtagaacaatttgttaatatttaagtgtatctagaacctgctctagatgaaaaaatgaatccaaaaagaccgagtagctgatctgctcggcctttttatgcaataatattgttaaaagatatagatttttttcaaaggaaataattatgacaaaattaccattcaaagttgttgctgtcgatatggatggcactttcatgcatgatgatcaaactttcgatcacaagcgctttgaccgcatcttaacagaattacacaaaaaggggattcactttatcgtttcaagtgggcgcccttataccagattacgcaaagattttgctggctttttaaaccgaatcgacatgattgctgacaatggctcgcttttgcttcaagataatcaaattattagcactcatttgctcacttataaaacaaccttagatctaataagttttatcaaagagcattattccaagagttcaattattgtcactgggatcaacaattcatatacaactattaatgcttctcctagttttaagcagacgatgaacttctattaccccgatcgaattgaagttactgatttagcagcggctatcaatccgcaggatatgattactaaaatcaccttaagttatcaatatgatttttccgcggaattagaaaaagaattcaaccaaacccatgccgagaagattcactgtacttctagtggtttcggtttgcttgatattgtgccttacagcgttaataaagggagcgctctaaaatacttcttacgctattttggtgctaaacccaatgaattaattgcctttggcgacggaatgaatgatgctgagatgttaaaactagccggttacagttatgcgatggctaatgcagaagatcaagttaagaaaatcgccaagtatgaggccccgagtaacaatgatgatggggttttagaggtgcttgattcatatttagctaaagtagagaaataataattactgtaaactaaaaccgtctgaatgagcaaaataaaaaagtagccaagttttcttaaactaattgacttaagaaaacacagctactttttatttacccaaattaacaaaggtattaaagttcatataatgataatgcacgcgcatatttgatacttcaaacggcgtcccatcatccaagaagaagatcccttccattacaccaacaggttcagtcggcttcaaatttagcttctgctgatcttcttcattcgatggttcaacagtgatattcaagaatgacttagtaacggtctttccctgttcatcttccaaatagttaaacaaagacttttgtaaagtttctggctttaattccggcacaattttaatcggcaaatatccagtctcaattaaaaatggttgttcatctaacagtcgcagacgcttgaattcataaacaaaatcattttcatttaaaaataagtcttccgcaatttctttagttgccttaatcacatgaaaatcaagcaacttaatttgttgttttttaccagggactttaaaagaatcagtgattccaagattcgatccatcataacgaaacattgcctgattgcgcaaatatagtggattaataaaagttccactacctcgctttttaaaaacgatcccttgttgagccaacagctccagcgcacgcttcattgatgatcgacttacctgatagtgttcggctagactgcgttcatcaggcagtcgcatcccctcatactgattattcaaaatattctgtttaatgtcatgcataactgtccgataaacataatctgccattattctcgtccttgatttgcctttttaatactatcaataaaccaagttgcaaacttatccaagtccacatctgtcgcaatctccgcattggcatgttcttggtccataaaatccattacgctggcaccataagtatattgcccgcgcaattcaatattcacgtttgcctttttcattgtaaacatttccggatgaagcataattccaactgcagtcggatcataaatcttaattcgcggatcaccgtctggttcatgaatgttagagaaaagtgaatacaacatattacccacttcaccacatgtcttaactttatccatttgctctggtgttaaatgggccttatttccaatttcaagtggagcaaccttaactggcaatccactataaaaaactacctgcgctgcttccggatctcccgcaatattatattccgcaaatgggctatgatttccgtgaccaatattaccacccataattacaatttccgcaatattttctttaacttcaggatattgcttaaaaagtaaggcaaagtcagttaatggtccaatgcccatcaaagttattttttctggactacttttaatttccttagccatcaacgttgcagcaagaccaggttcaattaaagaatcatcagcttgttcaaattcaaagccggcaatccctgttttaccatgaaccgaagcagcactaatcattggtgccaccagtggttgatcagcacccactacgacaggaaccttagtatgcaaaaacttttctaaatttaaggtattttgcaaggtatatttcagtgccacgttaccccaagtaggcacaatcatgcgcacatcaagttcttgtgcaaaaagactaatcgtcatggcagcaatgtcatcaatgccaggatcagtactgataattaaaggtttcttgttcataaaattatcctctcgtattaagtacttttataatagcaaaaaaccaaccaattaagaaagtggttggttttattctaataattatttttcttttttgggtttaatacgttgaatgtgttcttcttcatggtcacctaatactaatggcacacgctcaaccacagtatcggcatactccagtccgaaccaagatgcagggttagaagataaattctgcagccatactcttgcttcaaccatgaacttttcatagcctgtcaatttagttaatggactaattacgtcgttaacaattacaaaggcgaagtcccctacatcacgacccggtgtagtagtgaattgttgtggttgagcttcaatcgttccatcagcgatcaaatcatgaacaatttgccgcaaataaacatttacactggtttgttttctaaaacctaaatacaactgaacgttaattacattcttagtaccataagtattgaccgcgtattctgcagtatatggctcgttagtaacattaacagttacaaaccagtaagccttagcccgtttaggtctcttatccaaaattgaataaagcatttcgcgcttaatgaatttattatacttaaccttagccatataaactacattcgtagcgtaaactggataatcatcacagtggctcaactcagtcaacatatctgtatattcatctaagcgaacataagcattctgctcctcacgcttatcacggatcttattgccatagaaccacacgtacatgattgccaaaataaaaccagcaattaaaacagtgacgtaaccgccatgcaaaaacttagttaagcttgagaataagaacatcccttcaataaaggcaaagactactaagaaaatgcatcgtattgatagcgcggtaccttttttacccagatattcaaataataagatagttgtcatcaacatggtaaccgtgatggccagaccatatgctgcttccatatgatgtgaagttctaaataagaaaacaattgcaactgtaatgacacagatcatcttattaattgaaggaatataaatctgtcccttctcatttgaaggatagataatattcattcttggtaaaaattttaaactacttgcttcagctactaaagtgaatgaacccgtaatcaaagcctgagaagcaataatagcggcaatcgtagccaaagcaatagcaaacaatcttagactacttggtactgcttcaaaaaatggattgaaatcaccattaccagcatgataattagcattttgtaaaatccagacgccttgccctaaatagtttaaaatcaagcaaacaaacacataaggccaagagcccataatattacttttcccgacatgtccgacatctgaataaagagcctcagcacctgtagttgccaagaaaattgaacctaaaatcaaaatacccactttattagcaggactaaataaaatacgcaaagcatgaattggattaattgcatcaagcaaactccaatcatggcttaagttcataagtccaatgaaccctaaaaaagtaaaccacaggagcatgattggaccaaaggccttaccaatcacactcgttcccattctttgaattgaaaatagtaaaaccaggataacaatagtaatcaagataaccatatcttgcgacgaaactggaattacatcaccaaagcgcatatttttcaatccttcaattgaagttgtaacagtcacagctggagttaatgtcccatcagctaacaatgctgctccaccaattaaagctgggataactagccatttagccctctttctaaccaatgcataaagagagaagatccctccttcaccatgattagtcgccttcaaggcaattatcacatatttgaccgttgtcaataatgtaacagtccaaaaaatcaacgaaatggagccaacaattagttcacggttaacattactaatcccaccattttcagtcacaatcgacttcataacatacaaaggactagtaccaatatcaccatagacaataccgatagcaattaaaaggccagtaaaagacaccttttgcttaccagatattttattcataagtttttatcctctatttcacttaaaaattgaaatttttactagtatagaaaaagtctcgattttttgcaataaaaatatatctttttgaaaaataaaaaagaagatgaaatctccttcagtcacttaatttactttttcttatcttcgatggtgccatcactatgagcaataattacttcgtcacacatatccaggaacaagccatgttcaactacgccaacagtatgatcaaggtaatcagctaaaccatgaggtgctggaacaggatctgcagccaaatcaataatataatttccatagtgagtcacataacgttgattgccatccatacgccaccgaggctttaatccttcttgttcaaaacgtttaaagttttgttcacaagaaattggtaaaacttcaactggtaatgggaagccgcttaaacgatgcactaattttgattcatcaacgatccaaatgatcttcttagaattgattgctacatttttttctaaagttaatgcaccaccgccgcctttgattccatccaagttatcggcaacccgatcagcaccatctacagttaaatcagcttgatcaatatcggccaattcactaactttaaagcctaagccctcaagttgttttttactacggttactagtagttacgatagccttcagttttaagccgtcttcatctttgcgcttacctaaagcatcaatgaaaaaggcaacggttgaacctgtaccaacgcccaataccatacctgatttaaccatggcagctgctttttctgctgcttcttttttcaaacgatcttgttcttgcttgttcattattcatcatcctccatcgcctgtttaacttcctgttcagttggaattgaaggctgagcacctaaacgttgtacggcaattgaagatgcacgacttgcaattttagctgcttcttcaaagttagataggtcagaattcaaattgcttaccaaatatccaataaaggtatctcctgcaccagtagtatcggctgcttcaactttataagttggtattaattcttcaacatcgggagttgaaatatacgcacccttatcaccataggtaataaccacgttttttacaccaagcatgtgtagtttttctgcattagtggccagcgttgaattatctttaattgcaatgccagtgatcttggcactttcagtttcattcggtgtaatgatatcagtatattgcagtaattctttaggaatctcatcaactgcaggagctggatttaaaatagtgatttttttggcctttttagcaatcttaaatgcttcaagcgtcacatctagtgggatttcgaattgagcaattacacaatcccaactcttaatcaaatcaccagctgcacggatatcttccactgtcagttcataatttgcgccgtgatcaataatgatgtcattttgcccagcttcattcaacgtgatataagcatggcctgtctttgctcccattgtggtttgcacataagttgtgtccacgccataactcttgagctgatgcgtgataaaatttccttcactatcttcacctacacggttaataaagtaagtttcagctccacttttagcagctgcaattgcctgattagcacccttaccgccaccagcagtagtaatgtctagcgcattaattgtttcaccaggcttaggaaagtcttttacatgtaatgttgtatcaacattacttgaaccaataactacaatcttcttcattatgagcatcctcttctaaaaatggatttattcaacctcaattataacaaaaaacgtattcaaaatattgaacacacatttttgaaatcttactgtaaaataccaccattaacgaagccttttaagcgctcagcttcccacttcaatgtatctgaatcgtcaacttgcgagatcttatacccaacgaaatatggtgaagcatagaatcgtggaataatcttgcaacaagtaccttgaccatcattaattggatagaaaaataagttataagaatcaacaccatgtgacaagactgaacgcacatattgtgtgcccttttgaatcaaatcggcccaagtatccaaattagtattatcatgtgtcaaaatatttacttcttggtagccttgaactggacgcgctgataagttcatttcaactgaacccgaacgcccgacttcaaatcctttaaagttatcagcgccaatatcgtgatagccatctttatgatataagcccacgatctgcatatgtggatgagttaaagaaccatcagacttgggaccaaaatttttataccaaagcacactctgataacggcctgaattattcattttttgaaaacacttcaagccaaacttcatcaactcttgattatcttcacgcgtataagttgaaatatctccttggtgatcacttgattcaattaaaattgtttgattagtatcctttaacgtagggtacttattcttcaaccaaatcttatcgccatctttttcataaatattaattagatgctgcacatcacaaaaaggacagccagcattctgatttccttgccgattaccataatcataatcatatggcttacgcttaccaattgaatattcatacactaaaggattcttgtccatatttttcacctgctaaaccaaagatatcatacatttaacatcattttaacaattttatcggttaattgtgaacgtttttattaataaagctaggaatagtacgtctatctatgataaactacctttgtaaaagaaatacatgatatacatgagaggaagaatcatgaaattctataaaaaattggtacttactggtgccgcagctttagctgttctaggcttgagtgcatgttcaaataataattctagttcatcttcatctaataagaagattccaactaagattaacaagaagactaccgttaccttttggtattcactaactggtaatgcgcaaagcagtttgcaaaaattgactaaagattttgaaaagaaaaatcctaacattactatcaagttgcaaagccaaggtggcaactactctgatttacaatctaagttggtttcaggtttgcaatcgccaaaggatttaccgacaattactcaagcttatcctggctggctttacaatgctgccaagaacaatatgcttgttaacctaaccccatacattaacaattctgaaattggctggggctcatatgctaagagtggcattaagaaagctctttgggatggtgcaaacatcaacggtacacaatatggtgttcctttcaacaagtcagttgaagtacttttctacaataagaccttacttgataagtatgatgttaaagtcccaactaacatgagtgaattggcttctgcatccgcaaaaatttaccgtgaaagtcaccacaaagtacgcggtgttggatttgatgctttaaacaattactacatgatgcaaatgaaggaaacttacggcaaagacttcaataagaacttaaactttgctgccaaggattccgttaaagccatcaactactacgctaatggagtaagagccggctacttcatgcaagctggtactgaaaaatacatgtctaccccattcaacaatggccgcgtagctatgttcatcggttcaactgctaatgaagcttaccttaagcaaggacttaagaagggctacacttacggcgtagctgctcgtccaagcacgatgaacgtacaacaaggtactgacatttatatgttcaaaaaagcaaccgcaatgcaaaagtcagctgcgtttaagtaccttaagttcttaacttctaagtcatcacaactttactgggctaaacaaacaggctacatgccagttaatactgctgctatcaacgacaaggtttaccaatctgccaagaacagcaagataccagcaattattgccaagacctctaaaaacctttacttcttgccagtaaccaagaatgctactgccgcttatgaccaagttaatgcaaatatgcaaactattttggctaaggcatctaagaagcaatcatggactagtgatatcaagactggtaaaaataagcttgatgctgcttggaagcaataatttttcaaataaaatatctatcaaaaaaagaagttcagtattaattcaatgtcattaagttaagacattgacaaattatcgacttggacttttaagatcattcatttgcgatttatcgcatttgaatgctctttttcatgccaaataaacctaaatcttgtttagaaattaggctacacgatataaataatatacagctgatttgggtttgagatttcttttgtcttttcgtcctggtctgatcggaattgtgtaatgactaatttgaataagaatctttttaaagatttcagttgaagaagaaattatatacatagcctggatgacaaaacatgactgtttgaaattgatcgcatattgatacttgcattttttttgtggtacatatgcttgagcatcaatttgactgactgcgttaaacataatcatgtgggcatagatctccatttcaataaatctatcctgcttggaatgaaactgtacgctacctaaagcatatttcaactttttgaatgaagtttcaatgccccagcgcaaatggtagatttctttgatcctttttaagggataatcggctctatttagattagttagaacaacttcccattcttctttgcctgatttaggatcattaattctaaatttacaggcacgaaattttattgtacataactctccaaagtcccagctgccatctttggtatttttagaccgatattttatatattgacggtaatgatggttaaccaaatgaacgttttctgtagccttatgggtttcataataataattagaggtagtcacccagcaagctatatccttatcacactcttgattaggcaactcagctacttccttaaatgcgccatatcccgttttagtacgtatgacataataacagttaggcaggcgattacaattttcaatcatgttaaagccggtataacctcgatccatagtaactatatatggtccgcaatttagctttttaagcatttgaacggcggctttacgttcatccatctttgacttaggctgaaagatgcagtcttgataagtattatttaacaggtcatagagtgcattaacatgaatttggcaatatggctttcctttatgattgagatttccaacgatattctctgatttaggattccagatttgattaaaatcagacccatcaatggcaaatatacgatatttatgatcaaataactggatattaaataaattctgattaaatacagttagaatatgcttaaaacatgcgggtgaaagctgacctttgcgttggacataagcggaagtactgaccactttatcgttatttttaatagctttttggccaaaagctctaaacaactcactggtcaaatcttttccttgcatattaatagtagttttaatgactgtagctgcatctaaaaaccgcttcctagtgaaggcatgaggatcatcgataaaatcatgaatatgctttccagtatcattgataatttgatcaagacgatctaaaatatttctgtgaagggctttcataattaacaccagctttctggcaataattttgaaggtttaataatttaatcagagggcgaaaaggtaggttcttttctcctttattttatgcaaaaaaagaaccaaatcataatgattcggttctacagagattagattcaatttgtcaatgtcttaacttaatgacattggtattaattgaacttcttttttttacctaattatttactaaaaatggatattgaatttgatcattatcagttacattcaacttgtaacgagcacgatataaagccttttctaccgctaattgccctgcagttgtggccattgcaatcgaatatgacttgtgtggtgaattgatcaggatttgactgatagaatgcttaatgtatgactggattagaatgacataattcgattccttacatgcacgtaaaacattagaagcctgtttcatctcgataattcgagctactccattgtgtgcttcaatcaccttagccaagttagaggttaagctcttgtctcctactacaacggtaactcgttttttatcgaggtcaaaatcaattcgggaagcatagtcttcattttgcttttcagacgcctgcttctcctttttttctaattgatgcaataaagacttgtgtctacctttagtcttgtgcttttccgtttctttatttttatccggcttttccttcttttctggaatagtaacttcagcttcggcataacgccatctaaccctaatgaaggatggatcactgactcgccaaacaatactaatcaggtcattttcgtgtaagttaaagtgacttacagtattcatgtctaagtataaaatagctttttcaggatttacttgacttaggtttttgccattagagtcctgcttgatgtataaaccaaaagaatcacggtgaactaccgctggaccaaattcgataatttcctcatctggcgcaaaagactttgcatgatgctcaactttaataattggacgattgccactgtcatttaagtgatctagcaaagtaactgtatcaccgttttccagcttttcaattctagtcaagtgttcattaaaatattgtactgaatgaccattctcatccactgcttctgcacctagcagcttacgtctaatctcatattgtttttcctttggtttagccacaggaattattttcttaaccacaggcttaggaataggagttatggtcgcatatttgtttttattctttaaaatcgtaggactcagagctttagcagcttcttcttttttagctttttctttttcaagctcttccttcgtttttttcggctttattttttctacagtattttcatcattttcttttttagtttctatttcagttttattttctagcttattctcagtttttatttctggctcattttttacagcctgatcagctttttccgcaattttaacgacttcattcttattctcaggtggattgcctagtactgcctggttatatattttactaataattttcaacgcaatcattgactgcttcagtgattggggatcgctccccgtcgcctgcattaaatcaataatatcttttctataatcaatcgtcatatatttaccttcttacttcttaaatatgaatattatacaaaaatttttaagaaactgtcaaatcttttgtgtaaatagatctttctcgtaaattgattttttaattatttatttaatcaaagtaggattctaaggtgtcctgaacctgaccaaagcctttatgaattcgattgaaataacggtcattgtagctcattgcctgaatgccaataaaagcatcaagcgactgttcagttggaaactctgccttaggcttagctttgcgcttgatcacattgttaaatgattcaatcatgttagtcgaataaattgaagctctgatctgcttgggatagttataaaagaccagcagatctggttctatgtctttcaagcttctgataacatggctgtaaaccttgccccatttggtatagaagtcatgcaggacagctgtggcttcttctttgtttgtctgttgatgcacctgtttgaattcgttcatgatcttttcacgatcgtcgacgcgtactttagcgcagatattgcgcatgacatgaaccaaacagcgttgaaaatgagctttaggataagtcctggccaaggctgttttcatgccaacaacaccatcagaaagaaaaagctcaacttgctttaagcctcgggatttcatgttttgaagcatatctgtccagacttcaatgttctcgctaggtgcaatgcagtagtcaatgacctccttgtgcccattaggcttgatgccaatggcaatatagactgcttcacgctcaaatgtttctcggcgcaaaggaaggtatgtcgcatccaaatagacgcagaaaaacttgtcgcttagcttgcgtttgtggtaagcctcaacctttggaatcatctgcttggaaatatttgatacctgagctggactgtaatggctgccatacatcttttcaattagatcggctatttccctggtggtcacgcccttggagtaaagcttgataatcatgctttccaagatatccgagtgctgcttgtagtcaggcagcgtgtgctgatgaaattgaccgttgcgatcccgaggcacttgcacttcaattgggccaaattgcgtatcaactttgcggaaataagcaccatttctagagttgccagtattccagccatttctggcatagggatcatagcccagaaaggcagtcaattcagcttctaacaagttattaacagcctgttgtagctctttgcgcaataaatcatttattttgtctggattgaatagagcttgagcaaaatctttggtaaaatcattcatgaaggagttcttctttctgtatgtgtttttttgttcaaaccaatcatacgagaaaggaactcctttttctaatgtttaaagaaataaatttaaggaatcattcatccttacacaaactattttacagtctcatttttaatgctaatctaattctttatagatttttatattatttttcctgtaaaaccattataataaaagtagttaaaatatcatttattaaatgagggagactactatgaaaaagaaacttttacttttcgtatcctttttagccggtttattgttcttggtatctacaccaacttatgctagcaagcttcctaaaggctatggtattgctaaaacctttaccacaccaaaagcaacccgtggcacctggtattatcgcgaaaagggtgataaaacaatttctaaggtaaagatcactgctcatagcgtagatggtaaaaagctttacgtaccttcacaaaagttcttcgagaaaaatgtttacaacgtttcagctaagaagcgtaatcagttcatcaaaaaaactgaaaatatttatgctgcagctaactataaaaagggcttcaatgtcaacaattgggttaacttagctggtgatggtgaatactacatccctgttactagaactgttaacggcaaaaaggttaaggcattaagaatagctactggtgctggtccttatactgctgcatatgcatacaaaactaaggcattggttaaataatcattgtctaacgaaaaagcaaattagcataatttgctttttttctacccaaagtcaagtattatcaatgatttaagaaaataaatttacttgttttaatgatgcgaataaggttaaagcaaataagagtttaaatttaagaaaaagcgaaagtaccacaaataagcctatgaatacttgtagtttttccataggttgcttatacttaagttgattatttgatttcagctaaagtcttttatttttggtggctatgttgtaatcatataattgatcatgtttgataagagcaaacattgtgcgtatcagtttatggactgatgcaatggcgattttcttatagccttggctatttgaagatcgttttttcttgtcataataatcagttatatggcaaggctgcgtagcctttaccgtctccatttgaataataactcgataaagtatttttctggcaatatgattgccatgcttggtaatgccaagagaactgtctttttcaccagattggtaccttcctggatcaatgccaacaaacgcatcaatttgagctgaagtgctaaaccgtcttagatcaccgagctctgctactaatctcactgctgtaattctagcaacccctgggatactcaaatagatggataaagcacgagcgtttactgctttagccagcttttccatgtagttaattacatagtcgcgttcttgctggagtgaaaacaaattagaaatgttcctttgaatagctctaacgataatactatctttggaatcataaggataagcttctctagcaaaagcgtataatcttgtggttaagtaccgtgccctttgttgtcctattccagaaatagaattaagcatttgagttacctgtgtctcattcttttctagaacatatccagcatgtgggaaaagactaacaagcgcccaataaattctgccagatggatgagacagtatttcttcaatttgtgggaaagtggattggaggttgcggtgcaattgatttttagtagtaactatactcctagtaagttcttcataatagcgactggcattctgaagttcatgatactctctgggctgtggatcacgcaacttttgcggggcattaaattgaattaaagccaggcgataagcatctaccttatcagttttattatggcgtaaattattgtccattagctttttcgctttaagcggattaagcttcaaatacttaatatgataatcctctaagaaagcttgcaggcttagagaataaacaccagtagcttcgaaaacaactaaaggagttatcaaatattggttcagttgctcataaagtttttgatagccaaaggaatcattagagattctaaaagattcgccttgtttgatccggtcattaaccacacaaactgtggaagatttactgctaacatcaataccgaaaataatttgtgattccataatataacctccgctgtgaagataaacctctttatcaacctattaattctaattttctaaacacggcatctaagtgcccacagacttcgaagagacttaagaataggtggtaaagcagtccgtttcttttacgacatcaagtgtctaaaaagctgaagacttgatttgctttatcttcactttctattttagacaaaataaaaagtgccagatcgtgaatccgtcgattcatgatccaacactaggttagtatgtttcttttaccgatttttactttttcgtatttctccttcaaaaagagcggtcaattttgccaaactcttatgatcaggatagcgttgaactaattgctcaattttatcggtagctaatttttttacttcttcggctgagcccattttctctaaaaaatctgccaaatcacctgaacgagcaagtaacttacgctcactacgactttctgccagaaaagcttgatcaaccttacgtaacttcaaactaccatctgcattaaagtgatatcctccccacatatgctgcttaattggttgcatcggttcgctatctacataacacaattttcctaccatatggtgcgtctcagtaattcctaacgtaaccgggtcataaatatcgacatagttaaaaattttctcccgcattttagccacctgacgtcgttcagctggcgtcagtaaaagccaaatattggttccttcatacagataagcagctgcaattgcttctggatgacgacaattagctaaagcaaactgagcattaattgaacctaacgaatgaccataaatataaattctactacctttaaattgattaattgtctgattcaataagtgagcagctgattttaattggctaggaatcgtccgttttcgtgcaagcagtgcttttaaaattggtagattagttttaatccattcatcacgccaagtttgtggagtcccctttttaaaaccatatgatcctttaaataagattgttatttcattcggacttgaaatgacgaaggctcgcatcccatccttagcataaacattacgacaaacagttccaagataatgttgatctattttgatagtatcacccagctgcaattcatcatatgcctttttagttaattcaactcgttcacgatctgttaactgtgcatttacactcataattttccctaaaataaaaaactaactcttactattatgttagcatgagttagtttttttggataatttgagcctttaatcatattttttctgcaagtaatttgcaatcgttgacaagcagaaacagacaataaagtacatgattgcaataatcacatacattggaattaagtaagtcgtgttctgactgtaaataatttgtgcgtggtataaaagctctggcaaaacaatgatagttgccaatgaagtatccttaactaatgatacaaattgtgataataatgccggaatcatattgtgcaaagcttgtggcataattacatgatacatagcctgaccatacgacatcccgttggaacgggcaccttccatttgacccgaatcaactgagccaattcctgaacgaacaatttctgctagcattgcaccttcaaagatgactaacgctgcaattgaagctgtcgttggattcgttacaatacctaattgaggtaaaccaaaataggtaaagaagatgatcaacaatagcggcaaatttcgaataatatcaataataaagcctacaattgcagacacatacttaattttcatgtagcgaactaatcctaagattaatcctactacgaagcttaatgcaattgaaattaatgaaacataaatcgttacccaaagtccttgtaataagaagcggatatcgacccatgaatatgcatgaataaaagtttccattctctatccctttcctattagttgactaattttttctctaaatgacgcatgtagtaactaagcggcaaagtcaagatcaagtagaacaatccaacaataatataagtatcaattgtttggaacgttgagaacgcaatcaattgtgcttgatacatcaagtcaaaaccggcaacaaaggccaaaactgaagagtttttaaccaagttgacaaactggttgcctagtggtggaatcactatcttcatcgcttgaggtaagatgacataacgcatggcttgcacataggtcataccgttggagcgagcaccttccatttgaccagttccaattgaattaattcccgcacgaacggtctctgcaataaacgctgatgtataaagcgttaaaccaattgtccccgcttgaaatcctgacaatttcacaatataacgtggaacgatcaaataaaagatcatgacaattaccagcaaaggtatatttctaaaaatcgcaatatagatcttcgcgatcacttggccaaatttagatggtgctacctcaagcaaggcaaaaatcacgcctaaaatcaaactgaaaactagagcaataatactacttaaaatagtattccaaaaacctgttaggaagctgccccagttgttagtaataatttgccacattatttcaaaaccccctttagactaaaaccaggaattccagcaaaccactttttaatcaaacggtcataagtaccattcttttgtaattcattcaaagcttggtcgatatgatcagccatttgtttttgtcccttattaacagcaattccgtaaggagcattactatagacgccgccgactaacttataaccaggattttcttgagcgataccggcaagcaaaccgttgtcagtagttaatgccacaccttggttagccttcaatgcagacattgcttgaccatagtcatcatattgcaaaatccgcgctttaggggcatacttatgtacatcatcaactgcggtagttcctttaacggccaaaacagttttgccttccagatccttaacattcttgatcttactattattaggcactaacaaagatgaaccggctggaaagtatggcttagagaaggttacttgcttggcacgttctggtgtaatagtcattgtggctaaaacagcatcaacatttccattttttaaaagtgggattctagtgttggcagtagtagtaacaaaatcggttttagcatctttacctagcatttgcttagttaaagccttagccaaatcgatttcaaacccttcaatatgtcctgtcttaatgttcgttaagccaaacaatctagtatctgctctaacgccccaaacaattgtcttactttcttttaccttttgataaacattattgctagcatgcttgccacaagctgttaaggtaaacgctaatagaatcagcaaaggcaagaaaagaaatctttttatctttttcatggcgtgtcaccttaatctttagaaataactttgcttaaaaattgccgagcacgttcagtatctggatgagcaaagaattcttctggcttgcgatcttctaaaatatgaccattatcaaagaaaattaagcgattgcttacttctctagcaaaacccatctcgtgggtaaccacaaccatagtaatgccttgttcagcaacatatctcataacttctaaaacatcttcaatcatttctgggtcaagggcactagttggttcatcaaataaaatcaccttagggtgcattgctaatgatctagcaatcgctactctttgtttttgtccaccagataattgacgaggataagagtcaattttatcggccatacctactttttcaagatattgcatcgctactttacggttctcatcatcaggacgctttagcacaatcttaggcgccagcataacgttctctaacacagtgtgattattgtagagattaaagtgttggaataccatcccaacatttttacgaatcttattaatatcggtctttttatcagccaaatcatacccagttacaattaattgaccgctattaattggttccaagccattcatagttctaattaaagtactcttacctgaaccagatggaccaataattgaaaccacttggccttcatcaatctttaagttaatatctttcaatgcatggagctttccgtagtacttatcaacatgcttaaattcaataattgctgtcatggcttctacctttctttcctttgtctacacaatataattattttactcttcttaaagctaaaactaaatattttagcaattcaaaatagtataatagcctgctaatcttataaatttattcggttttagcaaaatatatttgtatttagctagattaaaataatcatattaacgctacttacgaatttattaactactaacttttaggataaagaaaaagtccctcatccctaaactgggacgaaagacttctttccgcggtaccacccacattgcctattagatatagacctactcatgaagcactatcatgcttcaccggtgtggtaacgtaccggagacgtctcaacctactctaagaattgttatttcggtgagctgctaaaagtgtttttcaatagttcagggtctattggcttttcactagcaccaactcactgttagaaataaactatctacttgtctttttcatagccttttaatttatttatatgtatttaaccttattttgggataaaaagcaagcaaaatttcttatacttcaaaatgaatccgtttttaatacaaataaatgctgttaatattcggaaaatagcttaaaatatttagtgatatattgaaaaacaaaggagtttgaaatgggaaaacttgaaaaacccgttatcattggaattgccggtggttctggaagcggcaaaactaccatcgctcatgaaattgcggataatattaatgatcaagatcgcattatgatcatgacccaggattcttattataaagataatactggtgtatcaatggaagaaagaatgaaaattaattatgatcatcctgatgcttttgatatgccgctacttgaggcacaattaagtcagttaatgcacagaaaaccgattgaaatgccaacttatgattttaccgctcatactagaagcgatgaaactattcatgttgagccggccgatattattatcttagaaggaattttagtcctcttcaatgaagatattcgcaatttgatggatattaaagttcatgttgataccgatgatgatatccgttttattcgccgacttgagcgcgatatgaaggaacgtggtcgttcacttgactctgttattaatcaatatttgggtacagttaagccaatgtacaaccaatttattgaaccaaccaagcgctatgccgatatcatcgtacctgaaggtggggaaaatgatgttgcaattgacatgttaactactaagttacaatctgttttgaaataagcagcaaaagacctgataatcacaaagcgaagattatcaggtcttttctttattctaaattatcttaattttgattatcatcttgtgcattagctgtgtccaaaattcggttatacttcttggcaaagaagaccaaaagcaagacactagcaataacataaattaccgctgcaatgtaataggcatttgcataaccatcttgggtagtaaataagtaaaattcggtgaagagtccatcaatgacaccgacaacagcataagcaatctgaaccacaccggtaaaggctggacgcaagtccttatcaacaataaccatctgaacttcttgttgaattggcattggctaatcctgttcttaagaagagcaaaagaccgacaattacaaacaaaactgtcccgctacctaagcgacgaccgttagctagcaacaacataactggcacacaggtcaatgtacctgcagcaacagaaacaatcgcccccatcttcttttccaagaatggcgcaaagaaatatccaattagcatcgctgcttgaacaaaggtgttaatggtagaagtaacatcacgtggaatgtgcaaataactattcaaataaatcggcacataaacagcaactaaacgagcaccaagttgaataccggcaatatagacaatccacatcaatgtcttcttgctcaaaagctttttatacatagccatcttctcttctctgctaggctccttgtcatctgcagtagaacgataatcacgtggcacatcatgaataaacaaagccaaaacaaaggctaacatggttacggcagccgtaatgtaaagcaggattctgtatgaatttgtataatctgctaaagtttgaccagttaacatctctgacttaccagaaagaacagatgcctcatgataaggaatgcctctaatcaaaccaaagaaccaaacgacagctttcccacctaaaaacgtacagatcgtttgtgtaatcaaattaacaatcattactgttgagaacatcttagttctaatttttcccggaacatatgaggtccacattaatggatacatcaaatcataaaccccaattgctgtccaagaaatagtataagcaatcatgataacgagctggttagtcgtgatacaagttaaagccataaaaatcgcagtcattggcggcaaaatcaataaaatcttgcgataaccccacttgtgaactgtagcgatcattactgacatcaaaatagcagttgccgcattaaaaatgtttaatccagaaatcaggtgtggcgctacaattttgtaataagatagagccgcatcattcgtaatcccagttactgcacccaaaatgccgtagatccataaataaataataacattatgtttgtaacgcggattccagttcttaattgcttctgcctcagcttccttttctgcattacttcgtcgagccatataaatcccctttttttgaaaacgtatacaatacatctaactttattctatcactcaaatggtattaataaagtgtgtgtatacgaaaaggtatggtttatagtttctaggcaactttaggttttaatgctttatcgaaaagattggtaatcaatttcactaggacaccatcaaacagtaatgatgaaatcatacttacaataaacatcaaaatttgtacattaacctgataatgactccaaccaaacaaaaagtaacttggtataaaaccacctaaattggcaaagaaagcaccagtcaaaacgctcttccatgagaacttttcatagcgttcttttttagggaaaaagccgatctcgttcattgctccttgaattagcccctcaaaaatagtcaaggctccccactggccaccgatcgccatctcaactgtggcagccagcaattcaccaatagttccagctcccttagttggtacaaaatacatcgctaaaggagcagccatataccataagccagtaaaaacgttgtcaacaaccggtgcataaccggtgggtaaaaagcttaattttactaagttatacacattgttaaagccataagtgtaaatcacacccatgatgatcccgattaaggcaactaaaataactgattttacattccattttgacgatctagtaaacataaaaaatgctccttactaacatactgtcagtaggagcacacaaataaaagttaattctcttgttagcactttcccttgcgcaagtattatcttgttcaggttcgaagggtattatctcagcattacgcacccctagtgacatttcatttatttatcaattaagtcaagtatagcacattgttaatcaaatgccatttgatctgtgtaaagtttgtaataaaatcccttttctttaagcagtgcctcgtggctgccttcttcgatcacattaccatcttttaacacaacaatcttattagaattcaagatcgtctttaaccggtgagcaatcacaaagcttgttcgtccagcaatcacagtatccattgccttttgaatcttttcttctgttaccgtatctacgttagaagttgcttcatccaagattaggaatggtggattcgttaaaattgtccgagcaattgacattaattgcttttgcccagttgaaaagattgagctagcatcgctaacttgagtatcgtaaccatcaggcaaagtctcaataaaatcatggatattagcctgcttagccgctgaaatcacttcatccattgaagcattcggcttaccataacgaatattgtccgctacagtaccagtaaataagacagagtcctgcaggacgatcccaacattatttcgcaatgatgttagttgaatatcacgtacatctgtcccgtcaaaggttactttacctgaattaacatcatagaagcgatttaacaggttcataatcgtagttttacctgaaccggttggtccgaccagagccactgattggcccttatcaaccgaaatatttactccgtgcaaaatttctttatctttattgtagccaaaatgaacattttctagcttgacaccatgattcaaaccactaatgaccttaccatttggcacttcgttttcatctttttgttcttcaactgtagctaatcttcttgccccagttaaagctaattgaatcatggaataaattgaagtaatttgcgtcaaaggttggaaataaacttgtgaatattcaacgaaagttacaatcaagcccaatccaatagcctgagaaatttgaccggaaataatcatccaagaccccatagcgatgacaattgccaaattaagtaagttcaatccgttcatcaatgggaataggattcccgaataaaattgccccttaaacaaagcggttcttactttattgttgtagaccttgaagctatcaaccgattcttgacgcaaaccattggtaataatcaccttttcaccattgatctgttcggtaatataaccatttaaatcgccaatttcatcttgctgcttatcgatataaacgcgagcttttttcattaaaaggacactaataatcaaaatgaatggtgttgtcgcaatcgtagtccaagccaaagtactattaatcgtgaacatcacaataattgttcccacgaacataattccctgggaaataatttcaaaaatcgcattgttcattgcgttgaaaatattatccaaatcggaagtaaatagcgataaaagtttaccatcctgatgagtatcaaagtagcgcactaacatccgttgaaacttggcaaatagattctcacgcatgtcattagttgaatccgcattgaacttggacattaccatccaagcaataaaaatcgctatctggctcaataagtaaaacaagaacatcgaccataacgcgctatagaacgtgttcatggatgctgtacccttttttaaatcaaccaaataagtagttaaagcggtaactgaacggcctaaatatgtaggtgccataacctgtgcaccactcgaaatcaaagaaaggataaccacaatagtgattcccttccaataaggcttcaaatacttagcaaaatagcgcaatgcctttttcgtattactcatttattcatttcctcctttcttacctttttgtgtcttgaagatttcttggtaaaccggcgaagtcttaagcaattcttcatgcgtaccttgtgccactaatttaccgtcatctaacactaaaattgtatcggcattaatcactgaaacaatcttttccgcaatgataaaagtagtagtatcaggcagctcatgctctaaagcttgctgtactttcttctcactttccgcatccagagcagaagttgaatcgtccaaaatcaaaattggtgctttagcaatcaagccacgtgcaatagatagacgttgcttttgcccaccggaaaagttagcagaacgctcctctacttcatgatcgaaagaatcgttataacgctcaataaattctgatgcttgcgccatattggcagcacgctgcaattcatgtaatttagcctgagcattaccttgacgcaaattagatgctattgtacctgagaaaagaactgctcgctgcagcacaaaagaaacagttttgcgtaatgcagcttcagttacatccttaatattttgaccgccaatttttacttcacccttagttggatcatataaacgagcaattaattgggccaaagttgatttaccagcacctgttgccccaacgataccaaccatttgacctggcttaatcttaaacgaaatatcctttaaagtaggatcatccccatcaggataagtaaaggaaacatgatcaaactctacgctaccgctaagaggtgcaaccgaaccactttccacaaacttgacatctggttcagtctccaatacctcacgaatacgtccaagagaaatattagctcttgaaaattgcattaaggtcattccggcaatcatgatcgtaaatagcagggttaaaacatagttcacgaatggactgactaccgcaatatcacttggatgtgccgtaatatttttaccaattaaataaacaattaaagcaattacggtataagcgatcatctgaaaagctggcataattgcagagaaccagtaaccaatcacaatgttgtagtcattcaattggtccgaagtttgatcaaactttttaatttcttgtggaccttgattaaatgacttaaccactctcacaccttgcaatgtttcttgtgcttgattagaaattcggtccatcatttcttggaatttggtaaacaaactattcatttgtcttaaaacgtaagcgccaaaaccaaaaataagtgcaaccatgaccactggtgcccaccagaagcgcggaataatcacgatacagaagataaatgaaccgacaattaaaatcggcaaccgcaacatctgcataaatagctgcatcatcatgttcattacctggttcatatcgttgatcaaccgtgtagttagagaacctgctgaaaatttcttaatattaccaaaagagaacgtttgaatcttagcataggtatcttcacgtagatcactaactactccttgtgcaattttcgctgcaaaataaacgttaaaaatacccgaaataattgcaattatacctaggactactagccagattccatcagacaagactgcttgcttctgattcgccatcaatgccttttgaatgttttccaataatttaggctgatataatccagaaaacgctgaaactaagatagcaataattgcacaaacaacatcttttttataacgctttaagtatggaagaattattttaaagttttccatttttactcctttcttcacttaaaaaatgccaaaaagtagtgctccattcttctgaaagcttagctaacaatttcattttgtcagttcccatggcttgagccgttttttcctctaactcaaatagaggacgcaacctgtcataagcatatttccgccctgcttcggtaagctggcaaaatcgaactcgcttatcgctaggatcaacagtcatcgtgatatgatcatgatcacgcagaatcttaattcctttgttaatcgactgcttgggtaaatcactcagatttactaattctctttgtgtcaattttccccgaatcagtaattcatacatgattaccactaaatagtccggcaagtcatgatcctgctcccattggctataagcacggctgccatggataattgatagatttaatttttctgtctcactaattttcattacttcaccaccatatttagtctacatgcatgccaaatatattagtatgcacatggactattgtcaaatcattttgtcaaaaataagactataattaaagtaaagaaacaatttttgcatctaaatttcaaattggtataataaaaaaatcatcaagtaaaacaaggcagggattatatgcgtaaaaagtttttattaataatttcaatagtggtcctgtttgctttgccattaagtggctgtaagcaaaacaaaaagcaaaacgtttatcaagcagttaaaactagtaaaaccattaactggggcgtcaaagccgacacgccattattcggctcaataaatattaaaacaggcaaacttaatggctttgaaattgatttagctaatgcattaacccatgaaatgctaggcaaaaatgccaaagccaatttcataacaacaacggccaacaccaagattcagcttctaaaaaacacgaatgtcgacgccgtcattgcagcaatgaccattacgcctgaacgtaaaaaacaagtcgaattcagtcacccttactttcctgctggacagtcaattatggttgctgacagtagcgccattaaaaatgctaaaaatttgaataacaagaaagtgcttgtagttaaaggaactactgccgccgatgctatccatcaagttgctcctaaagcggaaattttacaattcgatgattacggccaagcttttgccgcattaaaagctggacaaggagatgcctttgtaactgataacggaattttagctggaattttgcgtgatagttccggctataaattagttggcggcacctttaccaaccagccatatggtattgcagttaataaggggcaaaatgacatgctcaagcatatcaacactgcattagcaaaactagaaaagaatggcacatataatcacctagttaaaaaatggtttggcaacattcctggtatgaacattaaagaactagaaaagaaataagaaaaaggctaagatcaaaattttgatcctagccttttcgcttatttagcaatgaaatcaagtaaagtaaacattacatctttatttttctcaggcacaccatgattaataatctctgtaggcgtttgatgtaaatcattattttctaaagcatatgctccatcattaatagcaatctcacgcacattatcaatttgcggttcaaagtggaactgcaacccaattacattatctcccagtaaaaagccttgattcttaactagatcactagagaataataacttagcttcggttggaatttcactcatttgttcatgccaatgaagagctgttaacttatccggaattcctgtaatagtctgatcttgcaaataaactggtgcccaacctacttccttagcgggtgcatcaagtaccttatagcccaaagttttagcaatctgctggctaccaaaacaaattcccaagatcggcttgtgttgatctaacatttgtctaatcaacacacgttcatttttgacccaatcaagatcatcattaggactgtttggactgcctaggactactaatagatctgtttcatcaacagttggcaaaataccaaaattccctggatggtaaacgaacatttcgttatctctagcatggcaccaggcttgaatagaaccaggtccctcattaggtgcatgctgtaatacattaacgcgcatgaaatccctttctcactcaacaatatttttgtttttcattttatactcaattctagtggtaaacaagaagaattcagttaatcttttactgtatctttagaaactatatgtcaccttatatgatataatgttatacatatttttacatctggaggacttttatggacaatcaccttaaacgcagtattggcttaggttctgcactttcaattatcgttggaaccattatcggttctggaattttctttaaacaagcttcagttttagatagcgcaggctcaacctttatggcacttttagcatggattttagctgggattatcacattaaccgccggcttaacgattgcggaaatcggtgcccagatgccttatactggtggactttacgtctatattgaaaaaatttacggccgcgttttaggttttatggctggttggatgcaggctattgtgtacggtcctgctatgatagctgcagttaccggttttttaagtattatggtgactaatctctttggcatcggcaccgaatggcgtattaccattggtttgatcactatcatcgctatcggcggtttaaactttttagaaaataaagtcggtgcagcctttgctataatcactacaattgctaagatgatccctatttttgcaattatcttctgcggcatctgctggggtgagcaaaacgctgtcgcccaaactgtgactgagctgaatcgatcaacaggtggtcttggcgtagccgttctcgctgccctttttgcctatgacggttggatctttattgcaaagttaggtggtgaaattaagaatccacaaaaattattacccaaagcaatcatcattggaatcactacagtattagtaatttatgcgttaattactattggtatttttagtttcatccctgccgataaaattcatgcattaggtaaaaattcaaccacttatttggctgacactattcttggtccaattggcggtaaagttctatctgtcggcattattatctcaatgctaggcactcttaatggagaaatgctcacctttcctcgtgttatttacgctatggctaagcgcggggatttgcctttctcaagatttttatcatacgttacacctaagggaaaagcaccagttatggctactatgctcttaattgccttaactggaattatgatgactttcttcgatcctgattacctatcaaatctctgcgtcttcacaatttatagtttctatgttttagcattctttggcttattcattttaagatacaaaaataaggaccaacgtcctttcagcgtgccattttatcccctaattcctttagtagcaattgcaggcgggctcttcgttttagtcagccaattcttcaatgatcccgctggcgttttgctttttactggaattaccgctgtcggctggccaattttctttttagttaaaaagatgagcagagcacagaacacgattatcgaagactaaaaatctcaaatttttcttgttcatttttaataattatgatattctaattaaaattaatttaggagattcaattatgatttatcaagacaccacattggcatactcatctagctcaagttccaactgaacttgagtgattttggtgtacgtaaatcagcagccggattcactcaatcgtttctagacgataaggtgaatccggttatttttgtataaaggagaaaaaatggacaacaagcttaaacgcagtattggtttcggctcagctttttcaattgtaatcggaactatcatcggctctggtatcttttttaagcaggcttctgttcttgacagtgcaggttcaactacaatggccttattagcttggatttttggtggtctaattaccttggctgcaggtctcaccattgccgagataggggcgcaaatgccctacactggtggtctttatgtctacattgaaaatctctatggccgcattttaggctttatggctggttggatgcagatcatcgtgtacggtcctgcaattattgccgccgttgctggttttatgagcatcatgatgactaacttttttggtttgaatcattcatggcgcattcctttggctttaatcacagttttagcaattggaatcatgaatttcttcgaaaataaggtaggtgcaatcttttcggtcataaccacgattgccaaaatgattccgattgctgtaatcaccatttgtggaatctgttggggtcaacaagatgcgattaaccagactgtagcagaggttagtcaacacactagtaacttcggtgttgctgttttagccactttattcggctacgatggctggattttaatcgctaatttaggcggcgaaatgaaaaatccccaaaaattattacctcgagcaatcattgcaggaattacagctgttttggctatttataccctaattacaattgggattttccgcttcatccccgctaatcaaattcaccaactaggcgaaaacactactacttatctagctaacgcggttttcggtgcaatcggaggtaaaattctttccattggcatcatcatttcaatgatgggaacattaaatggaaaaatgctcacctttcctagaatcgtttatgccatggctaaacgaggagatctacctttttctaaatacttagcctatgttactcctaaaggaaaatctcccgttgttgctactttgtttatcgtccttttagcccttttaatgatgattttctttgatccagaccacttatcagatctttgcgtctttacagtttattgcttctatcttttagccttctttggaatttttatcctaagaaaaaaagaataaagcagagcgtcctttcagtactccactttatccttttgtgcctataattgctattttaggcggtttgtttgtcttaatcagtgaattaattaatgatccagctggtgttttactttttgctggaattgtcattattggattaccaattttttacgccgttaagcgcatgaacaaacatcgtttgcattaaagcgacctttctacactgtagcttgctcgccacaactcttccattttagctaaacgatgccaatcccctttttgacacattgtatataaagcatgtgcaggatcataggcaattggattaccttctgtttccttcaaataagctccaacaatgttgattaacatcatccgaaagcgttcaatctcatttcggctaaagtaagtttcaaaatacttgctggttaagcaatcaaccgttgcttgcgaggccttatgcaaagaagccggattcttacgatagttatataaagtataggttgaaattcctgttgccttacttaaactagtaatcttcacattgcgatcagttaccaatttttctgctctttgtacatcggttaaaattttcggatgcttaatgtgaggaggcatcggaatacgtttgcttaactctgcaattactttttcagcagcttccctcatttgctgagtggctactgtctcacttaccttgtcatcaagcaattctcctacaacgaaagtatgatcagtcacttcataccttctagtaattgcattgtaaaaatggccttcaacccctgtgatcttaactgcatcagttccagctttctcatagtcaaaaaagatgtgttgttgatcaccagttaatggtgaaaatggtaaattatctaacgtaaaaacttgtacatttaaagtataatctgaatgaacggaatcttctgcatcactacgatacattttcacttcccgatcatgaataaaatcttcaaaaataagattttttccatattttttttcatttcttaatccccttttatatagtcctattatccattataagcaaaaaactagcttttaaaagctagtttttgtttttattagaaaatattcggtttagggcaaataattaccagcagctaagtataaatcgtaccactcttgtctagtcaatcgaatcttggcacctttagcagaatccctaatgtgttgcggattcattgatccaactagcatttgaatatttgcaggatgacgtaaaatccaagctgcagcgatcgcatttttacctacctcatacttatcggccagtttttgcaactcttgattcaacttggggaagccatcattatcaatgaaagtcccttcaaacatgccatactggaatggtgaccaagcctgcacagtaactttgtgtagacgggcataatcaagaaattggctatcacgatcaactgatggtttatctaccatattcatatgcatcccaaagtcaatcattcctgtatgtttcaggctaaattgtaattgattgaacatcaagcgctggctcaagcaactttgtaacaatttaaattgagccgtatcaaaattagatacgccgaaaaagcgcaccttacctgctgcctgtagttgatcaaaagcctcagctacttcttctggatccatcaatgcatctggtcggtgaagtactaatgaatcaagataatctagttgcattctttccaaaatttcatcaacactatgcaaaatatgttctttagaaaaatcataacgttttcctggaacaattcctgttttagattgaataaacatctcttcacgcttgatctgcatttggctaaaagcttgaccaaaaatctcttctgattttccaccgccataaatatcagcagaatcaatgaagttgatcccagcatcataggcggcttgaattgccacttgagcctctggaactgatttttgattcattcgcataatgccaagtgccatcgctggaatgcttaaagtagtacatcccattttaattcgtttcataatgtaagtcctttcattctttatttacctcacatcatgaaccaaaaatagctaagtttcaaccacaagaaattcaataatcttttattaatatatcttagctactgccgattgaattgattctttatctaagaattcgtcataacttgtatcttggcgactaacaatacctttaggtccaacttcgataatgtggttagcaatagtttgaataaattcatgatcatgtgacgtgaataaaattgaacctggatatgaaacaagggcatcatttaatgcagtgattgactcaagatctaaatgattagtaggatcatccatgatcaatacattagccggttcaagcatcatacgtgacaattgacaacgaaccttttccccaccagaaagtactttgatcttcttctcaatttcttctccactaaagagcattcgacccaagaacccacgcaagaatgtgttatcatcttgttccttagtagcatattgccgtagccaatctaagattgtaagttcatcattattaaagttagcgttcaaatcgcgtgacatgtagttaaaggccgttgtttgaccccatgtaacggtaccagtatctggcttaagcttaccagcaacgatatcaagcagcgcagtcgttgctaaagcgttacgtgataaaaatgctaccttatcaccaggacgaacaataaaggaaacattatctagaattttttcaccatcaactgaataagaaacattttctaccttaactaggtcattacctaaatcacggtgcatttcaaactttacaaatggatacttacgactagatggcttaatatcatctaaagtaatcttatcaagttgtttcttacgagaagttgcctgacgtgatttagatgcattagcagaaaagcgggcaataaattcttgcaattgcttcatcttttcttcttttttagcattttggttagcagctaattcattagctagtttgcttgattcataccaaaagtcatagttacccacataaagctgaatcttaccacgatcaacgtcacacatttcagtacatacttgatttaaaaagtgtcggtcgtgggaaacaacaatcacaatgttagggtaatcagccaaaaagtcttctaaccattcaacggtatgaacatccaaaccgttagtcggttcgtccaatagcaaaatatcaggattaccaaacaaagcttgggccaataagaccttaactttttcgctttcaggtaaatccttcatcatcatttgatgttcttcttcaggaatccctaatgattgcagcagcttagccgcatccgcttccgcattccaaccatcaagttctgcgaacttgctctctaattcagctgccttaaccccatcttcatcaccaaagtcaggtttggcataaagagcatctttttctttcattacttgatacagttccttgtgcccttgaattactgtgtccatgacagtgaagtcttcgaaagcaaagtggtcctggttcaagctggacatgcgctcattaggatcaattgaaattgaacctgttgttggttccagtttcccctctaacaatttaagaaaagttgacttaccggcaccattggcaccaattacgccgtagcagttgcctggagtaaattttaagttaacgtcttcatagagtgtgcggccaccaaatcgtaaactaacgtcggatactgtaatcaatctctttacctcgcttaaaatataaaattatgtttaagtatatcaaaaaagatggtcccttataatagagaatccatctttttaagcaatttattaaaactttttgaagctatctagcttttcctgggtaatatcacgaataattgcagtagctaaatcaactgaagccttaaagtccttataactactgaaacaatatggtgaatgttcatagcgcaccggaataccgatgacaattgttggcgcaccattttcgtagtaaattgcagcaccatcctgaccgccaccggttctaactgaacgagtatatggaatattatttttgtcagctaaatcacatgcatattgttggaacttaggatttggtaaaaatgtcgtatccatatcgcgcaacattgggccacgttttagaccagtttgagaaagccagtcaggcgtaaaagtatcatcagctggacagctttcgagtaccagacaaagatctggcttaacttttctagccgttacataggcgccacgcaagccaacttcttcttggctagaaagtgcagccaccacgtcaaagttagtttcttcacccttcaaattatcaagcacatcaaccatcgcaccagcaccaaaacgatcatcaaagtctttaccgaagaataaaccggacttttcatgatattcacacttaacatcaacaaagatagggcaacctgtatcaatcttgtagtccttgattgtctcctcacggctagaagaaccaacatcaattgacatatctgccacatcaggtacattattgcgctcagctgctgtcatgaagtgaggcggcttagttgctacaacgccagggatatattctccatcacgattgcgcactttaacgcgcaaggctggaatattatattttacccaaccaccaagtggaacaaacttaattaaaccattagggcgaacagcttgcgtaatgaagcctacagcatctgagtgcgcatcaagttgaattaccggtcgatttcccttattttctttcttggcggcataaacattgagcatcccatctacctcaatatctgccgttttttccgcataactagtaaacagcttaacgaattcttcctcaaagcccgaagttgaattggcatctgagaattctttcaacatttggatttcttgttctttttgcataatttttcctttctataaaaaacgcttaatttaattttaccgagaaaaacagtcaaagtagactataattaaaaataattattgcaaaggaaaaataaaatatgaaaaataaattttcaatgataattcttttacccctgctttttagcttatcagcctgttccaaccgttctagtcgtcccgctacggttaacgaaacagtaagtagttctgcgacacataaagcatccaaacaggcaaatgagtttaagcctaatttaaaaaagaaatatcctggctttaagttaaccagcatccccgaacaatttcgcggtacctggtatcgtagcgatccactgagcaaatcagctcgcaaattaattatcaacaagcatacaattggtgactcagcagtttatcgacaagtggataagtccattaaactagatcataattctgagcaaaagaacaagacctattctggcggtgactccatgattgccatcgaacaacatcaagggcaaacttggatgcgcgttcgtgagtttttgacaactgtagatattatttatattactggtcaatttaaaggacatccttgtttatatcttgcatattcctctggagatatccacaatgcactttttaaaaacaaagcgctagcaattaagtataagacctatgacttttctaaaattaaatcatgaaagatattaacaatctactacaacaaaaaagtaacttactcttaaaaattagttcgttacccctaaatctatttccttatttagtattcagcctaattattaaacaaaatactacaatcaacgtgctaccctttgcactcttttacgcttttcgtcgcacaacattgtttttatttaaaggcggcgaaaatgaagataatgttattggctggttcggtttattggcagctttattaggctatttcttagggattttcgggatctttttaccagccctttactgcattagcgcatcccttgccggaataggcgccgcatgttttcctagcgttcaaaaacagatcgccattcaaagcgactatcatccaagcaagaacgatctttttgcttattttggcgcaattttaattttgctagcaacagttgtctttgttgaaccacatctgccagcgatttcatttatcgcaatgctcatttatacgctaattgctatacttggctttaaatattctccatttagagcacattcacgggaaattgtattgcagtggcaaaatgtctggttaactcttggtttgctactggctattctcttaattcgagaaggttggaactcgggaaaagacatcttctctatttttggcattatcgtttcaacagtagtcgttattagctatctgatcaaattagctttaagccaaaaacatggtaaattatctcgcaaaatgcagtatcgcctgacaatcgcaggcctctgccaagactttaccactatcttttcagccgtttatatttctgttttatttggtgcaaaaaattactactggttatttgtcattatcttaatcgccagctttatcaaacgtccattattaaaaacgctacgtgaatatttaccatttgatgacttcaccattcaaagttggggcattgttctcggtctagttattacgctctttaggccaacatactttgcagggatttttttgattcgaattttctacagtttacaaaatactgacaccttagatcttatccgtgatcatgtcgatacaaatatttatatgatcaactatcgttttcgcactgctggaggcttcttaactcaattaattctgtggggtggcttgcttttattcaatggaccgcacatctttgagcaaatctttaactaccatattaataaaagcgttatgaattctagtcagcccttatttttaactcacttaatcttggtgctattcataatcagctttacaatttatactttaaaacttaacaaagggaataaaaatgaatgaaaaacctatttggaaaaagaatttacttgtcttatctattgcggtctttatcgctggtatcgccttctctgaagtaatgccgtttctgccattatatattgatacactaggcaattttacccataagcagttaaacttttggtctggctttatctactccggtacttattttgtatcggcgataatttctccctggtggggaaaactagcagacaaaaaaggcagaaagccgatgacattacgagcttcattgggaatggctatcgtccttggctgtatggggctagttaccaacgtttatcaattatttattttaagaatgttacaaggtatttttgcaggctttgtttctaattccaatgctctagttgcgactgaaactccgaaggaaaaatctggacaagcacttggcactatggcgtctagctttactgctggcaacttactcgggccatttattggtggagccttagcgtctattttctcctatcgcgttaccttctttattacaggtggtctattattaattgcatttcttttgtcattgttctttgtccatgaaacagacttcaagccagtaactgaaaagaaacttgataaagcaagcggagtaattaaagaattacgctcaccgcaattaatctttggcttgcttttaactactctaattattcaagctgcaaataattcgattaacccgatcgtttcactctatgttaaacaattgatggctaaccacggtaatgtcgtctttatttccggggtaatagctgctttgccaggaattgctacattccttgcggcatcgcgcttcggtgaactcggtgaccgaattggaactcataaaattattattgctggctttattggagccacaatcctcttctttttgactgcttttgtacaaaatactgttgaacttggtattttacgctttttagtcggctttactgatgcttgcttgttccctcaagtgcagactttgcttactaaaaatacgccagcaaaaatcacggggcgaattttttcttggaatcagtcagctatgtatatcggtaatatttttggaccgctactaggttcaactatctctggattaactaattacagtaccgtttttattgttactgctggaattgtcgtctttaacttgattttgtttaaatttaatgtgattaaaaatttgcagtaaaaaaagtgtttgagtttctctcaaacactttttctctattccgcagctttctttgcttcatgatgattataaataaagtttgcaacatacccacaaataattagcaacaacgatacaatcataattgctctgattccagtatgaaaaatagttcgcattgttggcattaacgccttaggcaaactcttcgcagattctgcgtcactcaacttattcatcatggtcatcgtaatattgtggtgtccagcaattccacgtgctagagctaaattcataatcaccccataaacggcagccataatagtttgcgctaaaattctaatcaaaaaactaagcgatgtagcaggtgccatatccttttcaccagcgtcaatctgcacttttatttgaagaataacgaagattgagcctacacctaaaccagataacgctgcaatcgacatcaaaatctgatatggcgtactaatcggtacaataattaaaccgattactgttattgcaatcaatgtaaaatcgaaaattaacaaatgataattattaaaatgtctgagtaaatgcggcgtactttgtgaaccagcaatatcaaagattgagttaggaatcaacgtcatcccaccgattaaggccgttgtccctaagattgcctgcgaccacattggcaaataagtgttaactgcaatatatgcaccccaggcaaaggcaaaaagaatgaagtcaccaactaaagctttattagtaaaaaccgataacggcacgataggactagcagcttttttctcaactaagatgaaccagacaagcattacgatcccgataatcacgaaaatagccactagaaaattactagctagtcctaacatctgaattccaatcaaaaagcaagtcaaaccgccaattagggtaaaagcacctagtcggtcaaagacagtattgatgtttggcttacgaatgccacgataaaaaagaaaactcaagataattgatatcaatcctaatggaacattgatataaaagacccagtgccaggacaaagcatcaacaatccagccaccaactagtggaccagcaatacaagcggccgaaaaactagctgcaatataactcaagatgaccgtcctgcgtttgatattcggataaatatagccaacaatcacataaggaagagaacccattccaccagcaccaacgcccatcagcactcgagaaataaggaaaaagtaaatatcgggagccactccttctaaaactgaacctaaaataaataaggctagtgacaattcgaaggcaaatttgttacccattctttcaccaattttactccaaattggcactgagaccgacattcccagtaaaaaacaggcaacaatccaacccatatactgaattccgtgtagatcggacacaattgctggaatcgccgtattaataattgtcgcatctagccctgacataatattagccagcaacaaagacaaagtaaccattgatatttgcttcttagtcatttaatcccacctttttaactctaaaaactactattactcatagtatgcaagatttaactagcaaaataaagcacaatatttttccactaaatcttgacaatctgtgtttttccgagttaaatataaagaaaataatagtgatgacctttaaagttagtcccgtgaggctaagaaggaaatctgcacaagctaatactttttgttgttagctaatacagaaggaccatcttgagccatgcgctcttggtggtctttttcttttggtcatccagaaaggaaaaactatggcaaaagaaataatcgatgctttaagcatgaaacgcgccttgatgcgaatgacctacgaaattgtcgaacgcaataaaggtactaaagatcttgtattagtcggaattaaaactcgcggctggtacttggctgagcgaatcgccaaaaatttgaaaaacttggaagatgttgaagtccctgtaggggcaattgacatttctcaataccgcgatgatctaccagaggctgagaaggaaaagatgatccacagccaacaacttgacttcgatatcaccgataaaaacgttatcttagttgacgacgttcttttcacaggtcggacaattagagctgcacttgatgcattaatggatcaaggccgtccagctaagattaatttagctgtcctagttgaccgcggtcatcgtgaattgccagttcgtcctgactttattggaaagaatatcccaacggcaatgaacgagaaggtcaaagttgcaatgactgaagtcgatgataaagatagtatcgaaatcgttaaataggagttttttgaatgaataaaaaagaaaagtacagaaatccggaggccgttttagacgtctatgaaaagccggaattcggccaaggcgtactgctatccttacagcatatgtttgctatgtttggttctaccgttttagtgccaattttaattggaattaacccaagcatcgctctactttcatcaggaatcggtaccttggtccacatgctcttgacccacttcaaaatcccagcatacctcggatcaagttttgccttcgttgctacaatgcaagccttaatgaaggctgatggctacccggcagttgcccagggtgcgatcgcttctggtttagtttacgtagttgttgcgatcatcattagcaaaattggttcaggctgggttaacaaagttttaccaccaatcgtagttggaccaatcatcatcgttattggtttgtcactagcaactactgccgctaatgacgctatgatgaataattctaagtatgatttgacttacttcggtgtagctatcttcactttggtcatgactttagttttccaaatgtgcttcaaaggcttcaccagtttggtttcaattatgctaggaattatctgtggctatatcttatcctgctgcctcggaattgttgatttctctggcgtggaaaaagcagcttggttcacattgccagcacttgatgtgcctggaatcagctaccatttcaaatggtaccctgccgctattttagccatggcaccaatcgccttcgttacaatgacggagcacatgggccatattatggtattgaattcattaactaaacgtgactttttcaagaatcctggcttacacagaacgatgatgggtgatggtctttcaacgattatcgctggtttcattggtggtcctcctaccacttcatacggtgaaaatatcggtgtgttagctatgactaaagtttactcagtttgggtattagccggtgctgctgtttcagcaattatcttcagctttgtcggtaaacttgctgcattgatcgaatcaattccaatgccagttatcggtgggatttccttcttacttttcggaacaattgcatctaatggtttaaagatcttagttgatgatcaaattgattttggtgaaaagcgcaatatgttgattgcttctgtcatcttggttatcgggattggtggagcttacttacaactgggcaatttccaacttacctcagttgccctttccaccatcatcggaatgcttttaaactggattttgcctaagaaagcagctagtgaaaaagctcaagaagaaaagattaagcaagaaaaacaagaaggtaaaatttaccaatagatagaataagccattcaaaaacccgttagttatcgcaatgatagctagcgggtttatttttcactctcactttgcgcacgcaatgttgtaagttgcgcgaaagttggcgaaagttagtgtaagttacgagagcaatagtatataatttatttacacaaataaatttaagtcatgaggtgacattaaatggactttttaaacttcaaagcaattacacaaactggtaattttaaaacaccatctgaaaatgaaaacatcgaatacaaagaagctagttggaaattacctaaatcattttgggaaactgttagctcttttgctaatactttaggtggaataatagtattaggcatagcagaagataagagtaaacatgaatttagtataactagtgtagacaatgttgaagacattgaaacacaaattttcaatgataataacaatatttcatgccttaatcgacctgtaattcaaaataatgatgttcagatctctgtttttcaaaataaaactattattcaagtaataattcatccagaaccctttaatacccgtccaataactgctttcggtaaagcatatatcagaaccggtgacggagatcgagtaactactaaagagcaacttaaatattttacagttgaaagtcaaaacgaaatcgatactcacttactcccttcgacctatacaatagaagatttagacgcagagaatatcaaagaatatcgcaaaataattgataaaaaaggtattattagcactaattctcaacttagtgatcaagaattcttatattcaattggtgttttcagaaaagatcgattaagtaattcaaatgaatatcatcttacagatggtggtctccttttctttggaaaatatatttcgataacagatcgtttcccacgttttcaattagactatcaacaatataatagcgataattctaccaactggaatgatagagtttctgcaggtgatatgaattaccctactttaaatatcttttctttttacaatttagttttaactaaaatagaagcaaatgttcctgatccttttattcaaggtagtgaccttagtagaacgtcctatcacaacgatctaatcatcgcagctaaggaagccctagtcaattgtttaatgcattcatattatgatggtatggtaggtgtaaaaattgtagatagacctagttactttgaatttacaaaccctggtactatgcgcgtaagtaaagaatcatttttacgtggacaatattcctccattagaaatactgaaatcgctagtttatttagacgaattggtgtctctgaaaccgcagctagtggcggccctagaattcttaatactgtattgcaaaataatttaaatgatcctgaaattaacattgattatgaaatcaatactactcgcattcgtatttttaagacttttgcaattgataatcaggaaaaattaactgaaccagagaaatttattatgtcttttgctagcagaaatcctaatttttcaataaatgatattgttaaagatccgcagaatcattttggtaaacaaaccacgattagaaaatatgtaaattcattagtagagaagcatttactatccaatgagaaaattggcaaaaaatatatctacaatttacagaaaaacaatgattacgcgtggtgctagttaaatcgttctagacaataagccaaattataagctaaaattgcaatttccaaccggctttgaaagcctatcagactacgtgctcaattgttctcggcattgtaataggtcagaagcgaaaagtcgctttcaattgttctgcgaatagccatcaattgatgatcattgtgctttttagctcctgtcatatttttacgatatggtgtccaaagttcataacccatttgttttagctgttgatgcagttctttgcctaaatagccttcgtcgccaagaagatagtaattagatggatgggtattttccagcagttcaactgtctccctggcatcatgaactgatgcttttgttacgacataatcaagaatgtaaccgtcatcgctaacaatgacatgaactttgaaaccatagaagtaaattttcttggtggccttataaccaatgttggcataaccgcgaaaaattttagcacgatagttgcgaattggttggcaaacaggtaccggaaagctgtcaatgatcaagaactgtccattcaggtcaacctttttattcatttcttgccgtatctgataaatcaattgcaatagctgacgtgaacgtcgattaaaacgtgagtgtgataaacaattgaaacattcacagaatcttctttgtgattcaattcctgtcttagcttgccagataagtaaagccaaaatcagactgtccgtagttttaatttgatcaatatttcgccgatgagtaaactcagccggtgcatacaaacgataccagtgccgacaaattatcactaaatctttaaaactaacttgtaaatggtggctaaaacgcttaagcttaaggcagttcaatcagatcaggctcttttctattattatacaagttgagtctagtccgcttggacttttttattaactaaaacgatttaactagcaccacgcgtaatgattatctaaatcgcgttaaacaccttaaacatcttgaagataatttactcaaatagatcattcaaaaagctcaacctacaaaattatgtagattgagctttttcatcttatttatcttcaaatattctaggcttatcgtcatcaagtgaaacatgcggaatttcggtgttatttgtctcaacttgatcgttctcagacaattctgccttcattaactcacttttggctttactagaagtattgcctaaaagtaaagttttctcctgcggcgtattcaccattgcctgtttttctttgaattttttataaacaaccgccgctactgcaccaatagctccagcaacacctataattgtgccgattaatctcatctttttcatagggatcacctcgtattttgaaatcactttcttatccttaattatatctaattatgaggttgaacacatttttaatgcctattacctaaaactttccgcaatttctggatccatctcatcttctaaaacgctatacccttgatccaaagtcttgatcagagccatatcgtcatcatctagttcaaaatcaaacacatcaaagttttccgctaatctctccctatgaactgacttaggaattaccacataatttctttgtaaaaaccatctcaacattacctgagcagtagtcttatgatgcttttctgcaatcttttgcaagacaggattagtgaaaatgtggttggctccttccgcaaatggtgcccaggcttcaggttgcacgccctctttttccatatattgctgtgatttccattcttgattccagacattagtctcaatctggttcacagccggctttacatcattaaaagtaatcaaatcagctaagcgttcattccaaaaactacttacaccaattgccctaatgcgtccttccttgtatagccgctctagagcccgccaagtaccatagtagtcgttatatggcttgtgaatcagatacaaatcaatataatctaacttcagctttttcattgaatcgtcaaaggcttgcaaagtctgatcatagccatacttatcgacccagattttagaagtgacgaaaatatcctctcgtgggatgctgctatgcacaagtgcatctccaaccgcctgttcatttccataaatttgggcagtatccacaagtcgatagccaacttctaagccgttttccacaacttgttgagtttgagctaaatcatcaatttgataaacaccaaaacccaagcgaggcattttgacaccattatttaaaattacatagtctttcatatttcttctcgttttctagttagttcttgctatttaattttattttaacatagcccatgaaatccgactttattttttgaaacatagatattatttcttaaaattaagtactcaagaaaagcctaaccagcatccctcaacggaattgccagttaggcttcttttatttttcaacttttgcttgataaaatccaaagctcatctgcttcaacattctagtaaaactatcaatgtctagctttttaccggtagtcaaagcttcaaattcaccatcaggatcaaccaatttgcggtcagtcctgtgaaatccatttctttcatagaatttcaggcgactaacacgctgcttataatttttcgccttcttggtaactggctcaatatcaatgacaatttgcttatcagggaatcgatcctctaacatcatcaagatcttggaaccataaccttgtcctcgcaatttttcattaatggctaaataggtcaaatagactgtattatcattctcagcataataagtaatgccgcaaaactgaccatcattataaattgcgtgaaacttaacatttcggtgtaatgacattgctaaaagagaaaacatggagaatctttcccaagctggaaaagccttcatatataacttcttagcgtcacgatatgcttttgtgccccatcgggcgggtttagagtctaaaatagtatccttcttttctaattaaaaattgattgttaataactctgaataatattattatacaaaaaaatttgatagtttcttaaaattattttatatccgttcaagctaatctaattcaaattagtttaatttctacctcaactttaacctgtaattcaaattaattttaatctcttaagacttttgagataagttttaagttaacttgaatttgctgaaaattttactgctagatttaaataaaaagaaagcttgtcatctaaccaatgtcattaagttaagacattgacaaattatcgacttggacttttaagatcattcatttgtgatttatcgcatttgaatgatcttttttcatgccaaataaacccaaattttgtttagaaattaggctacacgatataaataatatacagctgatttgggtttgagatttcttttgtcttttcgtcctggtctgatcggaattgtgtaatgactaatttgaataagaatctttttaaagatttcagttgaagaagaaattatatacatagcctggatgacaaaacatgactgtttgaaattgatcgcatattgatacttgcattttttttgtggtacatatgcttgagcatcaatttgactgactgcgttaaacataatcatgtgggcatagatctccatttcaataaatctatcctgcttggaatgaaactgtacgctacctaaagcatatttcaactttttgaatgaagtttcaatgccccagcgcaaatggtagatctctttgatcctttttaagggataatcggctctatttagattagttagaacaacttcccattcttctttgcctgatttaggatcattaattctaaatttacaggcacgaaattttattgtacataactctccaaagtcccagctgccatctttggtatttttagaccgatattttatatattgacggtaatgatggttaaccaaatgaacgttttctgtagccttatgggtttcataataataattagaggtagtcacccagcaagctatatccttatcacactcttgattaggcaactcagctacttccttaaatgcgccatatcccgttttagtacgtatgacataataacagttaggcaggcgattacaattttcaatcatgttaaagccggtataacctcgatccatagtaactatatatggtccgcaatttagctttttaagcatttgaacggcggctttacgttcatccatctttgacttaggctgaaagatgcagtcttgataagtattatttaacaggtcatagagtgcattaacatgaatttggcaatatggctttcctttatgattgagatttccaacgatattctctgatttaggattccagatttgattaaaatcagacccatcaatggcaaatatacgatatttatgatcaaataactggatattaaataaattctgattaaatacagttagaatatgcttaaaacatgcgggtgaaagctgacctttgcgttggacataagcggaagtactgactactttatcgttatttttaatagctttttggccaaaagctctaaacaactcactggtcaaatcttttccttgcatattaatagtagttttaatgactgtagctgcatctaaaaaccgcttcctagtgaaggcatgaggatcatcgataaaatcatgaatatgctttccctaagtgtataattttttacggtaagttgaataaataattaaaaaagcccaagtcctttgaatttggacttgagctcaaacaaaaagaccagtagtctgatgttaagaacaaaaaacacattagaagctggtcttttatgaattcaattgtaactgaaatcgcaaatattataaagtctgaagataattatattaagcgtgaaagaaaaataatctgtttcttcttaaacctgattaaggaaatcatggccttggctttagctaaagttgatgatgaaatgattaccaaggttaaagcacagggctatcagattgataagaagaatgagcgctcaatcaatatggcttttggcgaagttaggtatgtcagaagaagatatgtctgcccaggcaaacaagcaaggtatcccttggatgaattaatgggctttgacaaatacaagcgctacagtattttagcagtcaaaaacatcttagaagtaagcagcgttgccacttatcgcaatactgctctagcagtcaattgcctgtctggctttaatattagccatatgcaggtgggcaatttggtaaaaatggccgggaaaaatattaaagcgggccaagaagcagattcaagatatgatgccgcaggcactaagaaaaaggtcccagttttgtatcttgaaggcgatggcgtggtgatcaaaggcactaaaagccggttggaatttcatcgctatcaggtctgtgaaggcattgtcaatataagcaagaaacgcagaaagcgaatcaatgccaaggaatttgtttctttaagccgacttgatgcgctgaacgaagccaaggagtacctggccaatacttatgatctttctgatactgtaattcttagcaacgccgatggcggtgctggatatgccaaaacagacttcgatgacattgtagggctatgcaagcgtcatgagcatttcttggatgtctttcacctaaataagaaaatcaaagaaaggctatattttgcgcctgacctgcaaggcaagctgatttctgctttggaatacaaatacagctatgacaaagttaaaactatcctaaccactgcagaaagccgactaattgatgaattgaataccgagctcaatcatgattatctggggcgcctaaggaattatattgatcgtcattgggacgatattaagccgtttaagaaacgaaaactgactgtgactaaagccattggctgctgcgagagcaaccaccgcaagtatacctaccgtgttaaggggcaaggcaagaaatggtcaaaatctggagcagaaggcatgcttaggatcttaagctgcatcaagaatcgagagctggaattttggcttagcagcgagtttgaagattcagaaataactgtattgactgaacaggaattaaaagcagcggcccgtgacagcttaaagaagcgtcatgaagttcatttaggcatccagcatggcgcattaaccgcacaggtagctggcaatagttatttaagcaagctaagcagaaatttaagtcatataaatatttaagaaattaaggttagactaatggtttaaaggctaccgcaaaaacattgacacttacatgctttccagtatcattgataatttgatcaagacgatctaaaatatttctgtgaagggctttcataattaacaccagctttctggcaataattttgaaggtttaataatttaatcagagggcgaaaaggtaggttcttttcgcctttattttatgcaaaaaaagaaccaaatcataatgattcggttctacagagattagattcaatttgtcaatgtcttaacttaatgacattggtcatctaacaaactttcttttttcatataataatcgttaactacatcaacttatatttcttcatcaattcttcaatatatgtgcctagaagttttatactgaaatcttgttctctctcaactttgatataaatttggcttccgcgccaaatttaaggatatgcaaagaaagacgcaattatcacatttttaattaaatatgagttaattgataatgagctgcaatttgagaaactttgcatttatcaactatttctgattcactcatgttttttattctttcatatggcatcaataattcaccggcaaaacattctgcttgccattctggatttttatatattggaatttctccatttcttctatatagagtcagtgaagaaggttgatgtaatataaggtgtagcaactcatgtgctattgtcattctatcacgtccaacatttctaatcgctcccatgtacaccgattctttaataagaattttatccttaacgatatcagtttgtgcctgaacatcatattctaattcatcattgtctacaatttcaaatgaaaaattaggatctaattctgatattttttctagtacacgcgtaatatcaatataaagttgacaaggatttatccctaataataatcgtacatctctagctaatgctcttaaatctttacgagattctggtttaacttcaaatattgaatcataactaattatgtctctcaccttctttcaaaatcttctgaatttgagctatttgtttatctgtcaaatcatcaaattttcttgcaaacatcaatgtagcttcctgcttttcaggtgaaaatttagatatatccaagctttcttcacttatgctcaatgcatcttttagctcttgttcttgctctctatccaagttatatctatcaacaatattattaattaatgatgcggaagccttcttatggccattttcaacaccagataaaaaagccgagcttaccccgacgttttccgccatatcataaagtcgttcatctcgatctaccctaagttttctcaaaaattttcccagtgctgtataagtcatagtttactttctcttttctaatatttactttctaaaatctttattataaataatctcattcactgaaagaagatcatatcttttaacatttaaataaattatactattactttcttttgtatcataagctggcaaataaaacagatcaccaacggagttaaaaacctttctaaattttacaccacctactttctcttgacctataactttaaattttgtcccagaaacagaatcactcaagtcgcccaaaatactaattctacaactatacctgttgcctgtttttaaaaaattgaacttatcatctcctaaaatatctgaatcatcaaacacagtataactttgattcgttttttgactctcaagaacaagatctcgagtaacttcataattaatgatttttgttaattcatacatagtattttatgcctttccaatcggataaaaactgacgatataaccattatctccatatgctattaaatatatcattccattgtgattatatataaaaacatctgctagctgtttaccttcttttctacttatatgtttaattggctttaattgaagaattttctttgcaagcaaaggaatattagtgtttgaaccaaaatcttttccatgccgagtttttatatgcaataacccactttttaagtttcctttctccagccacattaatttaccagcatagtttttcgtaatcatcactatatctgatttattatacttagcattactgttttctaattcatgcatcaaatctttaggctttagtcgttcttttgcaccattagtattaatataccctttataaccacttcccatcagtaagcctccttagcaaaaatttcttgccatgagggatatcttataaatttaatgtttcttttatatggtccaaaaatatcatcgggcatcgtaccataaaccaaaacttttttgggtctaactttttctagagcaatttctaatccagcttcaaataatattcttttttctttatcagcaatttgcccatatgtacccactgaacaaacttgatgcttaggaattccctgaaaaacaaaatcatatgatcttttatcaccccaacgtaaatttggaataatatttaaaccataattttgtaactctagagcaactctatttttctcatatacagcaaatttttgtaacactaatggttcgtcagcataaatgctataatcaggctggactacagatcctgcttttaacaatgatggaacaagtttagcaattctttcatcctttaatttagattcaaaacttttatcccattcatagaaacaaatagcatcatttaatgacgctatttttctgtcagaaaaacgaatcatttgaaaagggatcactaaatcttctttttgcttattcagtactgggtattcatcttccccagtaaaattagcattaagtaagttggacaatattatctcctcacattctactaaaaatcgaagagaaacatggtacactaaatatggttacagaagtatacttgcttctcttgcagcgattgtttcagcaatcgctgtattttatttctgttttcagttaatattattaacttatttagttaatttgtcaaatataaaaagaaagtctgtcaatctaacaaactttcttttttcataaataatcgttaactacatcaacttatatttcttcatcaattcttcgatataagtgcccttaaccttcttaagcatccctttaattgcaaacttttcaggcattggcaaatcaagatcagccaacttcttctggtcattcaggtaatacatcgcattcatcaacattctgacatcaaatgcggaagcgaagacttctggtacaccgcggtcaatattaagcaaagtgtagacagcttccattgccgtccgaactgaatactctgtcgtaaagacagtgtctcttggagtttcggcaaagttaccaataaaggctaagttcttagaatgatctggaacaacctttgggcggtcgcctaaagctcttggcataaagtaagaagtaatatatggcatgtgaaccggaattgttgtagctgcggcagctatttcaggaattctttcttccggcacacccatgtgatagagccactcttcacacatttcaagcccattacaatcaggcatcgtcttttccacataattacctttggtatcagagaacaaaccatataaccaaacaatcaattcatttggtttttgcgccttaaagtgtggctgacggctgattgagtaacctaatagccaattagaatccttaatagtagttggtccactagttacgattgagccactgtgtggatcctttttattaacagcttcaataaatggcacaacatcatcattcttaaaggtaatagttgcagacatccgccagttagcctttggaatatccttgcaaaagacatcaggatggccaaagtcttcatcttgagctgctaagttcttccacaatcgccagcttgcacccaattcatgttctgctggagcgggatgcagttgatctccataggtagtactatcagtaattgaaccattagtaacgaagactaagtcatttggtgttaagtcaatggtcttcttttcgccatcttcggttaaaataatttgtttagcaaccttttcgccgtcagagcggttaacaaagatattatcaaccaccgtattatagtggaagattacaccacgatcctttaaatacttgaccagcggcaaaatcaatgattcatattggttatacttggtaaaacgcaatgatgaaagattcttcaaggttgctacatgctgtacaaagcgcatcaagtagcggcgcatctccatcgcacttgcccatggttcaaaagcaaacattgttgaccaatataaccaaaagttagattcaaagaattccttagtgaagacttcattaatcttcttattttgcaagtctttttcgggagttaaacaaagatcaacaatttccttcactgcctttggcgttaataaaagttgcccatcagtcggcaaagcttgaccacgatttacaattactctagttttagcataacttggatcttttctatttaaacgatagaaggaatccaaaatagattcaccttcatggtcaggcgaagggattgatctaaataaatcccacaaacattcaaagtgcggctccatttcacgaccgccacgaatgatgtaactttccttttctttattatagatcccatccattgagccaccaggcagacctaattcttcaaaaatgtgaattttctcgcccttcatttgaccatcacgaattaaaaagacagcagtagctaatgcagccaagccactaccaacaatataagcagatttttgatcaacatctttaggtttatcagccttaacaaaggcttcataattgccattactataatgcataattgacacttctttcaataatcgttacacttgtaactatttacgcttataatataatgtaagcgatatcagttgtcgaacattttacatttggggatgatcttgatgaatatgaagagtctgcatacgcagcaacaaattgaacatgcattattcaaattactacaaaaaaagccttatacggagatctctattgcagaaatcacccgtaaggctaaggtatctcgtacttccttttatcgcaattatgaccaaaaagatgaagtcattgcgcaatttttatttaatcaataccataattttatcgctgatattgatcaacataatttgagaacttttaagcagcagcttactgcctaccttgaattcttcaaagataatcctcaactaatgaaattactgcttgatgcaggatttgaaagagaattacttaattttcaaactaaatatttgaaaaagctgatgtcagtttaccattctgatgtccacctgcccgactatgcaatagcctatcaatctggtggaatctatatgctgttagtctggtgggttaagcaaaattatcagaccagcttgactgatttaatcacttatgccgaaaaacacattatgctgtaactaaaaaagaagagctcacaaatcgagctttcattttcaaaattattgcaatttcttgcattttttaccaaagttaaagtagaaattcattacaaaggcgataattaacaaaatcaatgaaaccaacataatttccttaataccgccgtggaaaatagttctcattgttggcactaagttttgcggcaaactcttggcacttcgcgcatcactcaatttattcatcatggtcatcgtgattcccttgtgcgtttgaactccgctggccaagttcagattcataattacgccataaacagcagccattactgtttgagctaaaattctgatcaaatatgaagttgaagtggccgttgccatattctttagtcctgcatcaagttgtacctttaattgcaaagcaacaaagataaagccaaccccaatgccagaaaatgcaccaataaaggtcaacatctgcacaggcgtatgtatgccagaaataaacaaaccagctgatgagataatcatggcaactattccaatcaaaactaatttaaaggttgtcatatgctcctgaatcgccgctacactttgagatgcgataatttcaacaatcgaatttggaattaacgtcatcccaccaattaaagctgacaagcctagtaatgcctgagcccacattggcatataggtgtttactgctaaaaaggcaccccaagtaaaggcaaataataaaaagtcgccatctaaatctttatttttaaataaagaaattggaataattggattgtctgcatgaccttcgcgaataaagaaaaagacgatgaagactaaactaattataatcaatccaattatgatccagttagcggttaaaccaactagttgcacgcccatcaagaataaaagcagtccgattactaataaagtagcaccagggatatcgaaaaccggtgtcttttttggagtaaccggtttgtagtaaattaaacaaatcaaaaatgcgattaagccaattggaatattgatatagaagacccagtgccaagagaaagcatcaattaaccaaccaccaacaagtggccctaagatcgcagccccattccagctggcagttaaatagcctaatactttggttctagttttaatatttttaaacacataaccagcaatgatataaggtaaagaacccataccacctgcaccgattcccatgataaagcgagagcacagaaagaaaataatatttggcgctatcccttgtagagccgatcccaaaacaaagagtagcagtgaaagctcaaaggctcgtttgttagtgattttctctccgatcttggtccaaatcggaatcgaaatcgacattcctaataagaaaattgccacaatccaacccatgaattgaattccgtgcaaggccgcgacgatggctggaatagcggtattaataatagttccgtctagccccgacatcacgttgccaagcatcaaggctgccgtcaccattgtaatctgttttttattcatgcttaacttctttctatggtatgtaaaaagcgttagacaaaaatttctaacgcttttgagtaaaaaaatatggaggatacagggctcgaacctgtgacctcctgcttgtaaggcagatgctctcccagctgagctaatcctccattatggggcggaatgtgggaatcgaacccacgcatgctggatccacaaaccagtgtgttaaccccttcaccaattccgccatcaacggtccatatgggatttgaacccatgatctcctccgtgacagggaggcgagataaaccactgctccaatggaccaaactagaggaggatgtgggatttgaacccacgcgcggcataaccgcctaacggttttcaaaaccgtccccttaagccacttgggtaatcctccatagccgaacagatactagtataccaaagtgagaagataacgcaagaccttttttaaaaaaaagcaaaaaaataaagcctttcggcttcattaactatgtaaatttttctggaacagcaaatacttatattctttgccagcaatttcaataaaacgttgagtagcaatattacgccagccaaagtgcttaaagaattcttgtgcatctttatcttcagccagacaccacaagtaaatcttgccatagcccatcttcttcagttcattttctgcggcatttagcaaggtcttacctacattgtagccttgaaaatcaggtttaacatataatgccatcaactcaccgcagccaagcattctagtgtcacgtggacgaccatagctaacggctgcttgaacctcgttattatcgtctttaaaaactaaattatgacgaccactctcattgagtcgttttacccaagcagtagccggaatattatccaaaaatacatctggtagcacgcctttatacgtctcttgccaagttgtttggaaaagcttacttgtttgttttgcttcgtcttcactaattaatggtttaataatcatatttacttcttctttgtcaaaacagtcacagcctctacatgtggcgtttgtgggaacatatcaacaggatcgattcgcttaaattcataaccttgttcttggaacaaaagcaagtcgcgaatcattgttgcaggattgcacgaaatataaacgaccttcttaggtccagtcttaactgtcgcattaataaattcaggtgtcaacccttttctaggtggatcaacaaaaaccacatcggtcttcataccctttttagcccaacgcggcattatttcttcagccttgcctaagtaatactttgcgttttcaataccatttagctcggcattgtccttggcatccttgatcgcatcccggacaacttcgattccacgcacggccttcacatgcttagctacactcaaaccaatcgttccaattcccgaatatgcatcaattactacatcatccgaacctaaatctgcttgcttaatcgctaaatcatacaagcgcggtgtttgcagcgaattaatctggaagaaactttgaggtgaaattctaaactttaaatcaccaatttgatcagtaatctggtcattaccgaaaactaggtaatcctttttacccaaaatcacattggtcttcttaggattatagttcaagactaaacctgaaaccttaggaatctggctaatctcagctgcaacacccatcatttgtgggaaatccttaacccggctgaccaaaataaccattatctcgccattagccttactacgacgcacatcaagatagcgtataattcccgtattgtttacctcgtcataaggcgcaatcttgtacttgcgcaacacatcacgcactgcaaccaatacacgatcaatttccggatcagtggtaaagaaatttgtcaaaggcactaaatcatgtgaatgtcgtctaaaaaagccaatctcaagttgtccattatattctcgcacaggaacttgggccttgttgcgataccctgtttgctcaggactaggcaaagtttgtcctacttcaatctcatctaaatgtgccttcttaagtaagttaacaacttgattacgcttgaattcaagttgcttatcatacttgatatgagctaaagaagcgagtcccgtttgaacccattgattcaacttgatcttaactcgatcaggactttctttttttatttcttcaattttagcaaaagcaaagttcttcttaacctttaaaatctttgcactaaccacttcacctggaagtgcattagtaacaaatacggtcattccctcgtaatgggccacacccattgcttcatacgaaagatcggtaatttctaaatctataatttgattctttttcatactcactcaaccttaaaaaaatagctctctattattataatacttgaccaatctttgtgcttcaaaaaataatcgactgctttttagaaccaactatcacccatatacgcatgcaaaatgtggttagccgctactttcaacctcaaataattaatattattagaaaatagcataatcatacgcttggtcttgtaattcgcaacaaagcagcaattataaccagggatactgccattagcgcgaatgatgtcaccattaaaatacactccaccaaaataagctaccgtctgatgctgggcttggtggtaatactcgtttaccattttaggatttttcagcacatcgttatatacaaacttccaataatcaattggtgacatgaataagttccctgctccaaagtccgacgacgtcgtcactgtcacttggtgccagtcaacatttttactcattggctgagggatctcgttttggttaacctcagaaaaatccttaactttctggagcttaagtggcttagcaaaatcggtctgaatataagcattataacttaaattagtctgcttgctaataatagctgctagcaattcataatcaacatcttggtaatcccaagtatgaagatgatcattctccatgtgattaagcatataagctatttgctctttctgatttttaagcggagaagatggtcgagcattgttaaccaagccactagtatgattcatcagcccatgaattgtaatatctttactacctgaaacttgaggataatagttagataaagaggtattccaacctaataacttttcttgttgcagctgataaattgcagttcctgtcataattttttgtagcgaagcaatcggaaacaattgattagcgttaactatttggcttgaatcagtggtctccttattttggacaacaatcggttgcccctttttatcattaattaacattacaccgttgatatgatgaaacttcatataatcatgcagctgttctttctgattcttaatgccattatccagcttatcccctggctgcacaatgaataaaaatattgcaaaggcacaaagtgccaaaaagatggataaagctcgttttttatgcataaagattcctcttaattactatcccaagcaatgtaataactatatttcttcaattgtaaatctagtatctaggaagactcaactatttggttaatttttgcatctaaaaatattttacttaaatctattgacatacttttttaatcttgctatcatattgctcaacaagaaacgaaaagtagcaactttgctcagcgttcagagaactggtggtagctgcaaaccagacaggcaaagtttgacgaaatacgtcgttataatgttgttcggaaaaattcagaaccgttaccatctgatagagattcaagttcttatgcttgaaagagtgggtggtaccacggctattgtcgtcccgttgacttaggtcaacgggattttttatttggaggaataaacaatgaaaaaagaaaaaatttcctttacagaatcaatcattatcctgatagctctattagctatcctcggcattgctgtaatcaaatttagtctctcaccagaagtgcctgttttatttacagtccttctacttactttctgggctagattacgtggcttctcctggcaggatgtccaagatgggatcaaagaggggatcggcgttgcaattattccaatttttatttttattttaattggtgctttaatcggaatctggattaaagcaggaattatcccttccattatggtcttaggttttcacttaattagtggcagcttctttgttccatctgttttcatcgtttgttctatcattgggatggcaatcggtagcggttttacgaccatctcgactgtcggaattgcgctttttggcatcggtactagtatgaatattaacccagcattggttgccggtgcaattatttctggtgcggtattcggcgataaaatgtctccgctatccgattcaactaacctttcttcagctgttgctgaaagtgaattatttgctcacattaagaacgtgatgtggtcaacaattcctgcatttattgtttcattaattttattctggattttaggcaacagtggtcacatggacctaaccaagatcgaacacacttctcgtattctccaagctaactttagcatcacgtggtgggctcttatcccgattattttaatgattttctgtgcatggcgcaagatcccggcaattcccaccttatttatgaacattgctgtcaccgttataatgatttttattcaaagcccacacgaatcaattcaatcacttaataatttagtcatgaatggctttgttgctaaaaccagtgataaagcagttgacgctctccttacccgtggtggaatttccagcatgatggcaactgtagcattaattatttctaccctatccttagggggaatgttgatgaaatttaacgttattcaaagtgccatggagccgcttgtaaagcatctcaagaaaccaggtcggttaattacagtcactattttgtcaggaatctgcatcaacctttttgttggtgaacaatacttatcagtaattttacctggacgtgcctttaaacctgcatttgataaaattaagctttcaccattggcacttagccgcgtgcttgaagatggcggtagcgtaattaactacttgattccatggggagttgccggttcatttgctgcctcaactttaggcgtacccgtcttacaattcttaccatttgtcttcttcagtctgctttcaccaatcttctctattttaagtggaattactggaatcggcttgaagtgggttaaagaaaagtagaaaataatcttgtgaaaaaagttcctaggatagttgtctttaggaacttttttacgcaatctattagaactcaggaataaataatgcaaattaatgaccacaaaagtaactggtagttagctgatattggtgattatcttaaggttatcgctaatggatgtgtcatgttacagccaattattattcttttcttgaccttaccatttggctattcgcaacaactctttttggcatcgctttataacctagtcaaatttacgtcaccagccttcagcaacatggtcattttcacaatgttgcttcatttatttggcaatttttcagtggcaatgctgcacctcatctttggtacagtgtcatgatgctgcaatttttacttattatgccttggattaaggctatctgtaactgggtcaagcattcttattgccgcctagcagttgcagttattagatcgtatcttcatcagctttctaatttttgggctctacggtggtttaagctggaactttcatcatgaaattcagacttttctatttaaatattggtagctaattgttggaatttatcttttaacttacttttggaccagagatttatttttagctacttccaaattaacagatctaaccaacgacagttattacctaccttcaatggcaatttatgctttagctgttatattcttgacttacctaatctgtattgcacaaaaagtctttaatatgaaccattggctaaaatcaattcattttctagctttttatgcttatcgagcatttttagccaatgttttttgggatcggatcttttggcaatattttaattttaaacagctagctttacaaaacatttatctagctgtcttactactctggatttgcacatggtgtgcttcatatttatctgtttatgtaattcaccaactttggcttaaaattaatgattctgtcgatccatcctaatttgcgcacgtcgatattcctgactgtcacgtgtaggttgagcaattatgtctgtaactattatttcatgatcatttcgttcaaagacgattgcctgatctaattccgcatttacttttttattgatagtggaattttgattaaatttcaaatcatcaagctcccgatcaataaatgctttttgcgagctggttagctgatgatatttatctgcagcagctttagtaaacgacagaatcattttacgattaaactcacctattttatccggatgctcacttctttgaccgcgcacatcatcatcaatatatctttttttcatcaaaaatcacttcctctatttttactatacaagagatcatttctattagatatttttctgcttggtttagttttttcataagaaaaacttactatttatcatttatgtcctaaatacggtaaaatagataggacaattaaataaaaggagtgtagtaatctatggataacttttctaatactccaggacggcgtcaagtccaagatatttctgcggttaacagtttcttaactaagatgtacagtctaatgattttagctgttttagtttctgccgcaactgctttcttgacgacaactgtatttgcttcagcaattgctaacatgtcacaagccgtttactggatcattatttttgttccaattgttttatgtatgactatcagctttaaggcagctaagaatccgacactaggtttagtccttttgttaattctttcagcagtctatggctttgaatttgcctttattgcaggtgccttcaccactgcctcaattgcgggtgcctttttatctgcagctggggtatttgcagcaatggcaatttttggtactgtaactaagcgcgatttaagtaattggggttcatatcttggtgctgctttaattggtttcttagttgcatggctagtaaatgccttctttatcagaagcggtgctgccacctttatattctcttgcattggtgtattacttttcactggcttaacagcttatgatgcacataatgctaagaaaatttatatgacttacggtggtcaagtttcagacaccggtttagctgtaatgggtgcgttaaatatgtaccttgatttcatcaacattttcatgttcttgcttcaaatttttggcatgggcggaaatcgcgattaatctataattataaaaatagcgttgattggcttacactaatcaacgctatttttatttgatgatttcttatcctttttaagaaaactagtcagttcatctagcggcgtcttatgcaaaaatgccataatattttctctcatatcataaggtgaaagacgatcactgtagtttaataaaacccgaactaaatcaatcatactattaataaatacttgaacatcaataagcattgctattctttctttaccggtcaatttaatcccttggctatcatccatactattaattctctcaaaaaactcatcacaactcgtatcaaaaatcaaattataaaaacgaatatcaccattatctgaaagtagcaattgaatttcacgtttatgatcaaaacaataagaaatagtatttttggttgctgataatactgcttttaattgatcttgtgtaggaagagtcatatcaatattagctagagattcgcgatcacgtctaatactatctttatatccttcgataaaatcattttcaacgtctgccactaagctattaacgtctgcataatattgataaaaagttctggtacttacacctgatacttcaataatgtctttgacttttaactcataaacacttttttcttctaagcatgttagcagagcttctactaagcgattcttagtattagttactctaatatccaaatagcacccaatcctttcatctcattattcaaacataacatccggtgaaaataacattttactatcgtccaaatcttttttactttttcaacctaactgtaatttcattgttttaagcaagatgcattcataaaatagtaattgaaaaatgtaattagtaggtgatataagatgtttaatcaaaataaaatcattatttttaataatagaaaaaataattgctctaagaactatactttacctatgcatgatcaaaaactgctaaagcaatttcaatcaagtctcttagatgacataacatattatccttttcatcctcttagacatataaataagacttttgttagattcatcagtacttcaggcaagcctttattcaacgattttgtctatcatttgcaaactcgtgaattaattttgaatgacttaatcttaattagttataagtacctggtcaggaataaagctaatattgcttactctgatctaagaaagaattgggtaaatgtatttaacttatccttctgtaccaacgatattaagttcaacaaggaagctttattaaacaaaataaatgaagctaacaagatgtaattattcctttaacttccacatcttattaaccaaaaagaaaaagagttcaagtttagattgcttgaactcttttcgtttcttttgcttcaatttattattgtcttttagttagcttagccaccaacataaaattcaatatgctgttgcaaattgttaaattcaactggacaataaccaccgatctcaccatcaagattaactggtaagtcttgcccttcacttttaccaatcaactcggccttcaggctacgcgttttggtataaatgatattgggatcatcaacatgtttaccattcaaagccaatgccatcaacttcatcatgctaacagggtcagaaggcttgaccacgatcaattggaataatccatcactaagctgtgcatcaggcataacttgctcaaaaccaccaattgaattagtcattcctagtaggaacattgataattttccttcataaacgccatcatcataagtcaaacgcatctcattctcagtcaagtgtggcaacatttctgcccccttgattaagtatgcggcataacccaaagctgacttaacctcagatggtacgccatatgttaactcagttaaagaaccgctggcagcaatattaacgaaatattgaatttggtcaccaaaaacagctttaccgatatccattttacgagttttattctttaagattactttagcagcatctggaatattatcacgtggaatggctaatgcacgagcataatcattagtagtcccagcaggaataattgccattttaggcctgttttctaaaaaggcaatcccgttaactacttcattgattgtaccgtccccaccagctgctacgattaaatcaaagccttccttagcagcacgagtagcttcattgcgagcactattttcttcaggtgtagttctaaaagcactagcttcgtagcctgcttgttctaatacatctaaaatatcggccacattctttggcatctgttcgtgacctgatacaggattataaattaatcttgcttttctagtcataattactacctaacgttctaaaaattaacgactttgcaattcttggttaagtaacttgttaaccatcttagggttagccttaccacgagtttgcttcatgatttgaccaactaagaagccgattgcacgatccttaccattcttaaagtcttcaacagattgagggttatcatcaacaaccttcttaaccattggagctaaaacagaagtatctgacaattgaaccataccattatcttcaacatacttcttaggatcagtaccattttcagtagtttcggcaaagaccttcttagcaatcttagatgaaatagtaccgtccttgattaacttgatcatttctgccaagtgttcaggagttaacttaatatccttcaattcaatacggtgatcattcaagtaaccattaacttgagtgttcatccagttagctgcaagagttggatctgcgccagctgcaacagcttcatcaaagaagtcagaactttccttagtttgaagcaaaacgttagcgtcatatggcttcaaaccatatttatttacatagtcatcgtaacgagcaaatggcccctttggtaattccttagcaatttcatcgatccattcttgtgaaatatgatctggtgcaatatctggttctgggaagtaacggtaatccgatgcgccttccttaacacgttccaaaacagtcttaccagttgcttcgtcaaaacgacgagttgaaagttgaatatgaccaccagctaatagaacttgttcttgacgcttttcttcgtaggcaagtgaacgacgtacgtgatcgaatgagttcaagttcttcatttcgaccttagtaccaagttccttttgacctgctggacggatggaaatgttagtatcaacacgcattgaaccttcttccatcttaacgtctgaagcaccagtaaactgaacaatcttacgtaacttttcaaggtaagcgtaagcttcttctggatcttccatatctggttcagaaacaacttcaagaagtggcacaccctgacggtttaagtcaacgtatgaataaccgttagttccgtgagtgttcttaccggcatcttcttcaatgtgcatttcgtgaataccgattctcttcttcttaccacgaacttcaacttcgatgtaaccatcacgagcaagtggttggaagaactgagtaatctggtaagccttagggttatcaggatagaagtagttcttacggtcgaagtgagtagttggcaaaatgtgagcgtgggttgcgatggcaaccataatacctaaacggtaaacgttcttgttaaccattggcaaggtaccaggcatagcccagtcaattacattagtctccgtgttttgttcagcaccatatgttactggtgaaggagagaaaatcttactctttgtctttaattcgaagtggacttcaagtccgatagtcgatttaaaattcattcaattagtcctccattccagttggtgttttttcataaaacttgttagtgcgttcgataaagtcagcagtcttgaagacattaccttcatcaaaacgcttagccataacttgtaaaccgacaggcatcccatcaactaaaccagctggaacactagctgcaggaatacctgctaagttggcagaaatagttaaaatatcattgttgtacatcttaattgggtctgaaacttcttcgccaataccaaatgctggctcagtagtagttggtccaacaattacatcattttctgcaaagatcttgtcaaagtcatcacagatcaaggttctaaccttagcagcttgtctaaagaaacggtcatatgaaccagctgaaagggcaaatgaaccaagcataattctacgcttaacttcagcaccaaagccttcagaacgtgatttaacgtaaacatcaagtaagttcttagtgtccttagcacggtagccgtaacgaataccatcgtatctttgcaagtttgaagaagcttcacttgaagcaatgatgtagtagtcaggaacaacgtatttagtatgtggcaatgaaacctcattgatcactgcaccagcatccttcaaagcatcgatttgcttttgaataacttcacgcatcttaccgtcaactgcttccatgtattccttaggaacagctacgcgaaggcccttaacatcttgaccgataaacttggtaaagtcaggtacttcacgggttgaaacagttgagtcatgctcatctgcaccagcaattacgtttaatacttcagctgaatccttaacgcgcttagtcattacaccaatttgatcaagtgaagaaccaaatgcgataagaccccaacgtgatacacgaccgtaagttggcttaataccaaaaataccgttaaatgcggctggttgacgaattgaaccaccagtatctgaaccaagtgctgctacaacttgaccactagcaactgcagctgctgaaccaccagatgaaccaccaggaactttatctaaattccatgggttgtgagtagcaccataatatgagtgttcagttgatgaacccatggcaaattcatccatgttggtcttacctacaaaggttacgccagcttttttaagcttagaaataactgttgcatcatacattggcatgtagttgtacaaaatgtgactagcagcagttgtcttaatcccgttagtgatgatgttatccttaattgcgattggaatacctgctaacttactcttggagtagtcaaggttatctgcaggcttagcatcatctaaaacagtgatccaagcatttaacttcttatctgtatccttaatgtttgccacagtgtctttagctaacttatctgctgacaagtcaccgctggcaagctttttgtttaatgaatcaatattttcgtttaagtaattcattactcgtcctcatccttattaataattacaggaaccttaatgtagccgtttgccttttcaggaacgttagccatcaatgtttctctgtcttgtccttgccagtgttcaggtttatcttctctgaagacagtatcacgatcaacaacttgaactgtttcatcaacaccctcagtatcaacttcactaagttgatcagccatattgataattgatcccatttgatcagtaaatttatctaattcttcttcattaaacgcaagtcgcgaaagagtcgcaacgtgtttaatggtatcttttgtgatttccacgcaaatacctcctattcgccgccataaacatggacttgataatcactatcgccggtttcttttgcaactaaagcttgtacatcatctactgaaccaattttgatttcaattgggatattgccagacaagtactttttagctgacgacaaaaccaaacgggtaaaactttgaatttgttcatagccataaaattgcgttgttacggaaatgttttcttgtgaaagcttaccgtttgtataacgcaaagttgccgttaccccactaatattagggaagtagttttgaatagccgtcttgaaatcattgaagtgcgatgcatcatcactgttaattgctttttcactaccagttgtcggtaaaacttgcattttttccgacatggatttccatttagatattttactactattagcggccgctgtcccgtaagcgaagtaagttccaccaactaatgaatcttttccagtcttggagaacaaaccaatcgtaatcggaatattctttaaagctttcttcttacgcaagcgagcaacaatttcattagctattttttcaccttgagctttttgctcagcacgtgaaatagtagtttgaaattctgcaccgttacgctttttctgataataatcaaccgaattcatggctaagcccaagctcataccacctaaattatacttggaaccagatccagtcaaataatcttgttcgataatttcttccaaataaattggattacgcgtatcggttccggtcttaccattatttactgggtttaaaccatcaggatttgatttggatttacgcattaaccaatcagttacagttgaggtatccaaatattgtccttcttggaagacgtattgattaggcgaaaattgattcttagaaatttgaatcagccctcgctctaattcacgcgtatcaacagaattatcattatcagtagctgttaatcctgcaatcggactaatattatagcgaccatttttcattaaaacggtatagccattcgttcccgtgttagtagtttgatagctttttttcttagtggttgaagtggttgtcgcattatttgctaaactagaatccttcaacttaccacaaccacttagagtaagcgcgattccagctaaagccattacttgcaaatattttttcacaataattgtcctttattcaatttgtgcaattgcttcttcttcagtcaaaagtggtacgcctaaagtctgcgctttagtatacttagaaccagcatctttgccataaatcacgtaatcggtcttatgcgaaactgaacccgtaactttggcacctaaagcttgtaattttttcgtaaactcacttctagtataatgctctaatttacctgttagcactacagtcttatccttaaatggattatcttcaatttctgcaggctcatctgcacctaggtaatccatattcaggccgctctcacgcagctcatcaattaccttctgtgcttctggttgagcaaaatatgttgtcattgattccgcgatcgtcatgcctattgtatcgatagaagctatttcttgcacgtctagagacataatctttgccagatttttaaacttttgagcaattaagcgtgctgctttggccccaacatggtcaattcccaatccagtaatcaataattcaactgagttttgctttgaattgtctaaggcagttaacaaattattgatcgatttttccttaaaatgatcgagttgtgctaaatcatctgcagttaagtgataaagatcagccacattatgcactaaatctttagcaatcaattgtttaacgatctttggccccaaaccggcaatgttcatagctggtcgagaagcaaagtgcgtaatgccctcctcaacttgagctggacaagatggattgatgcagcgcaaagctacttcatcttctaggtgaactaatttttgcccacaggatggacaagtcgttggaatctgataagctacagaatctgccgatcttttagccatgacgacttcagagatttctggaataatatcgcctgctttatgcagtttaacggtatcaccaatcctgatgcctttttcattcaaataatctgggttgtgcaatgaagccctagctacagttgtaccagctagttgcaccggatccatgaccgcagttggagtaactactccggtacggccgacagtccaaacgatatcccgcactacagtttcttgttcttcaggtggaaatttataagcaatttcccagcgaggcaccttaacagtgttaccgagctcttgttcaattcctagatcatcaatttttaacacaatgccatcaataccatatgttaggctgtttcgtttagctgtgtattcatcgataaaggcaaaaacttcatctaatgtttttaacttacgaccggtttcattggtatgaaagcctaaatcatgcattttttgaattgcttggtgctgactagtaatttcttcaggcggattaacccaagtataaataaaggtactaagttgacgcttcttggtaactttaggatcaagttgacgcaaagaacccgctgcagcattacgtggattagcaaaaactactagaccttgctcttctctttctgcattcaacttggcaaaggcttccttgcccatgtaacattcaccgcgcacttcagttgttaacggttcaggcaaagtctgtggaatatcactaatatacttagcattagctgttacatcttcaccaacataaccgttaccccgcgttgaggcacgaaccaacttaccattttcatattcaagcgatagtgataagccatcgatctttaattccacgttatattcaactggatgaccaactaatttttgcatccgttgatcaaaatccttcagttcagctttggaaaagacgtcccccattgacagcattggaatcgggtgctctaccttggtaaaatcactatcaatctgtcccccaactctttgggtaatggagtcgggtgtcacaatctctggaaattctttttctaattcaagcaagcggttgtagctttggtcgtaaacattgtcttcaacctcaggcgcgtccttagagtaataggcctcagcccattcattaagctgttttctaagtgaagccgcttcttttttagcttcatcaagagtaatttctgccatttttccctcctgatccaaatcaatctttctttaattatatcttcttaattggcgcaaaggcagccaaaagccgtttgattcctttaccagggaaagcaatatccagctccatatcttcaccagtgccattaactttagttacaacaccatgtccccaagctttatgctcgacttggtcgcctacattccagcccttcttttcagcaccgacagcgcctgaaactttcttagcagtataaacttcagcgcgagctcgttcggctttgcgagcaaatggtgccgtctgtttctcaaagctagattggataaagctgctttgtaatttttcattttcttctttgtgcagatcctgttcatcaatttcgtccaagaatcttgaaggcggattattttgcattctgccatacatcatccgtgagtaagcattagttaaaaacagttcttgcttagcccgagtaattcccacgtaagctaggcgccgctcttcttctaattcattgtcatccatcattgcacgttgcaacgggaaaagcccatcttccatgccaattaagaaaaccactgggaattctagtcccttagctgcatgtaaagtcattaaagctacttgattgtcatcttcatcaagatcatcttgatcgctaagtagagatacttcagccaagaagtcgcttaatggattagactcatcttcttcgggctcataatgatcatcaaaacgcttagtaactgacaagaattcatccaagttttctaaacgcgtttctgattcaattgtattttcagctcgcaaggcatcggtataatcaaaatcagctaagattttttcggttaaaccggttactgtaccattttgagcataagcaattgcatcacgtaatttagtaccaaaatcgcttaatttcttggctgctctagtattaattgaactttcagccacatgtcccatcgcatccaaaatgttgtagtgattctcatccgcaaatgttaacaacttatccacagtagcggcaccaattccccgctttggagtattaataattcggttcatactcatcgtatcagctggattagcaactaacttcaagtaagccatcacatctttaatttctttgcggtcatagaatttatgtccaccaacgatttgataaggaatattgcttttaacgaaagcttcttcgactgttctagactgagcattagtccgataaagaattgcgaaatctttgtaagcccgttttttatctttaacttcttcttggatctttgaaatgatgtagtgagcttcatcatcaccgctttgggcttgatagtaggttaccttttgcccatcaccttgatcagtccacaagttcttagccttccggttctggttatttttgatgaccgagttagctgcggacaaaatgtgaccagtagaccggtaattttgttctagcttcacagtcttaacatcatatttcttgtaatcctgctcaaaattcatgatgttttccatattagcaccgcgccagccatagattgactgatcggcatccccaactacacaaatattcttgtattgtgcagccaaagcatgacagagttcatattgagcctggttagtatcctgatactcgtcaactaaaagataacggaacttgttttgataatagtgcaaaacttcgctatcttttttaaacaaaactagggtctgcataatcaaatcatcaaagtccataatttgatcacggcgcaatctacgttgatattcttcatacaccttagccgccatcttctcaaatggtgacaatgcactctgcataaaagcttcaggatccagcaagtcattcttgccattagaaatcgcggctaaaataccgcgtggatcatacatcttaggattgatattcaagtctttttcaatatgcttaaccaaagttaattgctcggccgaatcagcaattgaaaaattatgaccataaccaatcttatctgcatcccgacgcaagatccgcacacacaaagcgtggaaagtcgacatccaaatgtcgttagctgctggtcccagcaacttttgttcacgctcacgcatttcactagccgccttattggtgaaggtaatggctaaaatattccaaggtgcaacatgattttcttcaactaaataggcaattcgtctcgttaaaacagaagtcttacctgaacccgcaccagcaacgactaataaaggtccttcagtggtttctaccgcttctttttgttgcggattcagaccagctaagatagatttttcgctcattattttccccttcactaaaaattatttcattaatgcaacttgaatattataccaaaaaagcagcgactaattcgctgctttagatttacttatcatatttttcaagatcaaactgttcaatcaaattaatcagcttatcggcatagtccggatcagtcgcatagccgtcggtaaccaaggctttagcttgtgtcttataatctttggatgctagaacatgcttatactgatcgtggttccacgttgtcccattctggaataatctagcgtgagcccgaatagaagcctcatatgagtcatatatttggaaacgcgccttcacggtaacccacttattctttacatattccttagttgtcatcactgccgaagtgttcgggttggatcctttaacaccaaaaagattgttgtatttttgcgacaaatcactttgtccataattactttctaggcaggcttgagcaatcgtgatgcttggcaataagtcatacgacttgtccacttcgcgcgcaatcggaccaatttttttgataaagtcttttttctgttttaatagttttgctgcttcctgttctttttgcagctgtgcttgttgaatctgctctgattgaatcgcgtaacgcctataatatctaaagccgacaaaagcaaccatcagaataaatagaattacgaatacacgcacaacggttttgacactttttggtactcttgatttacgttttcttgccatagttttattccctttaattactaattaaagtataaccgatttttgagtaaaaaaaagaagtcgctcactgcgactcctcaatcagtgcgggcgagaagactcgaacttccacgatctaaagcgatcacaagatccttagtcttgcgcgtctgccattccgccacgcccgcggcacatcaactataatagcctaaatacagttgagatgcaagaaaaaatataaattattttaaatttctgatcattttacgcaaaagtttgcgctaaacgcaggtgtcccctacatttaccacaacgatacttttgtgtattaatcctgcgcattcttgggtatctcaacccacagttttcacaaagatataggtaacgatattttttctttttacgtaagccaatatcaggtgcataacgactgcctccaacttttttcagcaagattttaaaattgcgatcacggtgtcggtaacccaagcccaataaatgcaaatgatagtgggttaattcatgcttaatgattcctactagataatcatgatattgtggtactaaaaaatgcgcgttgatttcaagatggtgatcatccaaatgataacgcccacctgttgtggtcattcgccgattaatttttacaaggtgcttaaaagggcgatcaaaatattttaacgaaattttttcaactaaattttgtaattcattctcattcatggataaaattttattccaaaaataaaaatcagcaagaatttaatctcgctgattttttgctacctaaatatcttggcatacatccccgcctgcttaggcgtactaatgtgtcgtttcaagaaagttactaagtcatgtttgaatgactttttaccatccatccaggttccagtgaataagtgaatcgatttggagtccttagaaggattacacagaactccatctgaatagacatgaatgccatcttttaacacttgctcctgattacctagctttaagccatacttatttaccagcatttcagtaacggaaatactatttactcccgccatctgattcttagtgtcatattcaaaatcacgatcttgataataatccaaaatatcctgcataaatgggtggcctttttctgcaccaaaaattgcagctgacagataatcatggttttcaaaaccaataaaggcagaagcattcaaaagactatctaacttatccacgactctaacatcagtatctaaatatatcccaccttgttcataaatagcccgtgctcgaacatagtctgacacgaaggcccatttttttgcagcataagcttgttcaatataacgattctcatgcatatcaaaattatcttcattccactcaataatttgataatcaggcaattttttcttccaggttgcaatacattcttcaattatcggggatttaggattgtgtcctacccaaacataatgaatttttttaggaatcatttttaacctcgcttcaaaaagttcttaattagcttcacaatatcatcattaaaatcaagcttgaacaagaacatcaatgtcagataaataattaacatgacaattgacttaaaagccatatcgaaaaaggcagatggaattatattaggcataaacattccaatagccaaggttagcaccgcaattaacaaatacttgggcacgtcatggaaaacataactaaattcatagccatcacgtacaacccagagccgcaaaattaaaactactgcttcagtaattaatattgcaatcatagccccacctgcgccatatggcctatctaagagataactcaagacaatttctaaaattgccccaataactactggcacagcataatccttgtctcgctggttagccaaagcaaattggttagcaaataccccgccagtcggaatcatgataattgttaaggtaaaccaaaacattaatggagtcatcggaacatatttattcccaaagaaaaatggtacaaactgtttggtatttgccataataattacggcgaacaaggtacccagcattacagtagcttccagtgattttttcatcactatcttttgtgccttttttccttcgctcgccatcttgggcataataactagcgaaatactggtaattacacccagaatcatatttgaaattcgttgtgaattgtcataaaaagaaacctgagtcgaattagaaaaccaacccaaaattggtttatccagcgaagtataaatttgagtcgcaatctgtggaatcatcaaagtaccaattgcaattgccgtctgtttaaatttgtaaaaatgagcaactggttttcctacatagcgccgaatatcaaaccaaaagacaaaggaacctaacattgtcgacactgacatgatcagtaaatatttccacaagtcagcgggtgattttacccataataaaattagaaccacactaactaactttaccgccgtgtttttcaaaacaacacgaccaaagtcagctagtccttgaaagaaccatgaaatatcaacctgtgctgagatcaagtatggcaccatcaacaagatataaaaccaatattgaacgtgaaatacagtcgctacaaaaaccgtgactaaaatggtgataataccggcgattccttgaaaataccataacccccagaaagcattggttagctcctgcggtgtaccataagtgcgcgcccgtgaaattgttcgcatccctacatacgacacagacagaatacaaaaaatcatcaagaattgcaccgtattgttcacactgctataaatcccataagtcttaggacctaagacacgcgataaatacggtacagtaatcagtggcaccaatacaataaaaatctgataaaccgcattatataagatgtttaaaaatgttttacgcattttaacctcgatattcctgcgtcatgtacttaaagacgttctcacaatatgaatcaccatgcacctggttagtcaaatgtagccagtaaagacggcgattagcaatctgctggttatcaagttgatccagattgcgaattagttcatcctctgaattaacacagattccgggagtaatctcagcatatggtcccattagtaatccgcgcgttttttcatattgctctaaaaagttagtcacaaacacaatcggtttgttcaagtgcaagtaatcaaagtagattgacgaaaagtctgtcatcaagaaatcagtatcaccgagcaattcgtacaaatcataattgtggtcaaacaagtaatcattgttcatgaaagcaatgttagaataactgctcttgaaattggcaaataagcgcatttcatagggatgcaattttacaatcagatattgatgccgcttctttaattctgtatttaatttttcaacatcaaaatcccgaaaggcaaaaaagtttctctctttgattttctccataatggatttatcttccaattcataacgaaaagttggcatatagatcccgatctgtgcctgatcgtcctcagttttaaataagtcagccaacaattgtttcttcgaaattaccggcttagccaataaatccaaacgcggaaagcccagcttgcggtatttttttgtctcaattgccatacaagcactcattagtgattcatatagatcagagctagaagcaacaatatccgcattcttgtgccacaatttttcgttacggcgattgtcgcgtcgcttagtattattagccataattcccatgcgcttgagtggaacgccatgccacaactggacattaatttgatgcttgcgcaccttaaatggttggtgcgttgtaattacatatcgcgctgctccgattttctgccaggttttccacttcaagtgtgacgatggccacggctcaactaatgtaacgttatattcaggatgattcaattgcagccacttgtaaaaagcatagccgttagatccagacctacctgaaccattcaggataaccacattattgttttccatcgtggtaaatctagccaaaaaactcatccaagccaaataaagacggaataaaaagcttttcattaaaatacttccttaaaatagtctaatacctaaagcatataaaaaaagcctgagcaaactcaagcttttttctttatttttgttaaactttattctttacccatttttctctggcagaatttaacaatttcaacaatcaaaaccatcaaaattccggcaattaaaatgactaaccactgtggtccatcaagttcagtcacatcaaagaacttagtcataaatggcaattctaccgctgccataattacagcagcaatgataattgcaccattgaaccacttgttagaaaaagtatgcggtctaaaaatcgactgatgtacatacttggaattaattgcatggaacagctgaatcaagcccaaagtcaagaaggccattgtcaatgcatccccatgttgcaacgatggatcacccacatgtggaccgacatgcaaaccaatttggtatgcacctaaaactaaaattccttccaaaattccttggtaaataattgaactggcaacaccaccgctaaagaagttagacttcttaccacgcggcttgcgcttcataattccagcttccactggttcaacacctaaagcaatagctggcaaagtatccgttaccaagttgatccacaagagctgcacaggagctaagatatctcgacctagcattgtcatcatgaaaactgttaatacttcacccacgttacaactcattaaatatagaatggccttttggatattactgaagaccttgcgtccttgctttactgcttcaacgatcgtggcaaagttatcatcagccaaaaccatatcgctggctcctttagaaacttcggtcccagtaattcccatgccaattccgatatcagcttgcttcaaacttggagcatcgtttaccccatcaccagtcattgcaacaatcttgtcattagcctgccaagccttgacaattctaaccttgtgctctggtgaaacacgagcataaacgctgtagtcaccaacatgctgtttgaaatattcatcatctagtttatcaagttcagccccagttaaaacgcggctatcctgacctttttcaataatacctaggcgttccgcaattgcttgagcagttgtttggtgatcaccagtaatcattactgttctaataccagcactctttgcttcagccacggccgctttagcttcaccacgttctggatcaatcattccgactaacccagcaaaaattaaatcttgttcaacattatcagttgttggatcggtgtacaattggtcgactttcttataagcaagccctaagacacgtaaagcttgttgcgccatctgcttgttttgcgctaaaatattttgcttctgcttatctgtgatcggctctacttgaccaccattttcaatcctagttactcgctgtaacaacatatctggtgcgcctttgaccgctacaaagtattgctcgccatctttattaacagtactcatcaatttccgttctgaatcaaaaggcacttcttgaattcgtttgtatttttcaagcaagtcagttacatcaatgttttgatcaaaagcaaattgaatcagggcggtctctgttgggtcacccaataagtctccgccattttcaatcttagtatcattagccaaagtcattgccaataaagctgggttattttcgctaatactttcactattatcatgtaactttttatcatagaagaccttttcaactgtcatccggttctgggtcaacgtaccagtcttatcagaacaaataatgtctgtagcacccaatgtctcaacagcaggcaatttacggacaatcgccttatgtttggccatcgtttgcgtacctagtgccaaaataatcgttacaattgctggcaagccttccggaattgcagctacagccaaggaaacggcaaccaagaacatgttaatcattaaagtagagttacgctctgctggatcagccttgagcactcctacgataaagacaatcacgcagattgccaaaatcatgatggttagggtctttcccagttgattcaagtttcgctttaatggtgtatcagtttcatcagcattgttcaacattgtagcgattttaccaacttcggtgtgcattcccgtactagttacgattccttcaccatgaccataggtcacattagtattggaataagccatatttacgcggtcagctaaagcaatgtcttcaccttctaaagtttctgcatgcttttcaactggaactgattcaccggttaacgctgattcctcaatcttcaagctgtgggcttgattcaagcgtaagtcagcaggaaccacatccccagcttctagtaaaactacatctccaggaactaaccctgtgcttggaatagtaacgattgtatcatcacggcgcacatgcgcatccggcgtagccatttccttcaaagcatcaatcgcagcttcggaacgtgcttcttgaaagacgcccaaaattgcgttcaaaatgaccacaatcataataattgcggcatcagtccactcatgagctaataccccagacaaaatcgcggcaatgatcaaaacaataatcataaagtctttgaattgatcaataaaacgcatgaacatgctttgctttttcttggaagctaaggcattgggaccatattgctctaatctagctttggcatcactagcacttaacccatccttaacggacgtgttaagatctttttcaatatcggggatcgactcgacataatatcttttcgccatttttcctctgctatataaaacatagaaacatgcagaagtttgatattttccacataccagaaaaaaatatattcttcctttcctaattttatttactgtcgtcatcattggtattccgatattccatctggggagtaatcgcattgaccaactcctgcagcttaagggcttagccagccccattatcttttattttgttaatgccaataaatttaatactgcattgtcatcacgatcattgctatagccacactcataacaaacatattcattgtgcttggtgccatgttttctattgccctgcaaagtgattttgtctgcaccatttttgacatagccgcaactagcacatctttgcgttgacgggtagcttctatcagccaaaattagctctttatcataccaagcacatttataggataatatctgtctaaatttgccaaacaaggacctctgtatgcctttggaagccacatgcgtcatcatcatttgcttgacattcaagtcttcaatgacgatttggtcataattatttgccagctcagtagtaaatttttgcaaaagatcattctgaatattgaaagccctgcgataatcacgctgaagcttggttctcacttgcacgtaattattgcttcggccagccaattttccattaactcttcttttcttggccaatattctctgataatgcttgatccgcttgtacagtttctgcagtcttgccggcaaaatattgattctgccctcagtatagctgaagtgcccaacgttgacatcgatggcggtctttttgccagttttaacctttattccagctttttcttcgtaggaaagagcagcgtaataatggcctctttctctaaagatgctggcaattttaacctgtttcatcctcaatgcttcatatgttggaatatcaaaccatgatttaattcctctgggcttatccagtctgagcttgccattaataactttagctcggtcagtcttaaaaccttgacgtggagctttctttgacttgaaatgcggcttgccccagtcgagctgggctttgtcaaaaaagctcttccaagcgttggccaagtccttgactgccaactgcagacaacgagcagacaaggtaaactgccaatcagccttgttattgactaattcatctcgcacccgacactcattaggactaggattattatccttatttaaagtccgtgcttcatacatatcttgccaggtttctaaggctagattccagcagtatctgcggtaatcgcatagacggtcaagttctctttgcatggtcttgtttggttttagctcagctacctgtgttttaatcatttatttcacctccaatgcaaacataagtttagcaaaggatgaaacaaaaacaagcgaacaaaatattaaatttttagcagcagctaatttgtttctatgttttatcttcctgatcaaattaactgcatctttttctatttattgctatcaaatcctatcttttagtcaatcattatttcctcctcaaaaataaaaaagagacttacatgcttgtagcacataagtctcacgaattaagataaatccagaagtatcttacttcggctgttggattcatcgcaagcaattgctgttactcccttatgacaagttaattataagcaaaattttagctatctacaagttttagcgaattgcttttactttttataaaagtcatcaaagacagtaaccggcaaatgacgcttgtgtttactcttattccataatttttcaatttgatcagctgctttatctgatacttccttaccttcaaggtaatcatcaatctcttggtaagttacaccgagggcaacttcatctggcaaatctggcttttcttcttcaaggtcagcggttggagccttttcatataaatgtttaggacaacctaattccttaagcaaagccttgccttgacgcttgtccaaacggaacaatggcgtcaaatcagctgcgccgtcaccgaacttagtgtaaaaaccactgaagttttctgccgcatggtcagttcccacaactgcacccttgttagcaccggcaatagcatattgcacaaccattctttgacgagccttaatattccccttattaaaatcagtaatcttttggccagtggcttcaacgaccttcaccatggcatcaactggttccttaatatttacgatcaaatcttgatctggtttttgaaaggcaaccgcatcggcagcgtcttgagcatcagcttgaacaccataaggcaaacgaacagcgataaattgataagaatcatcgccagtttcctcacgcatttcttcaattgccatttgacacaatttaccagtcaaagtggaatcttgaccaccagaaatacctaagacgtatgacttaagaaatggattagcttttaaataatctttcaaaaaatcaattgaacgtctaatttcttttttagggtcaatttctggtaaaacatgttcataagcgataatttctttttgtaattctctcatcgaccaatgcttctttctctaattttacgccgaatatcttgaatcaaatccatcttggattcgtataagttttgtgataaatccactggatattcctgcggattcaggctacgcttatattcatcccataaaccatcaaggttgtcagcacagaattttttaatttcatcaagactaggttgatcataaactaattttccatctttaaaaatatcatgtaaaagtggaatagcagtgtaatcagttaccaccttattaatatagttatattgtgggtggaacatgaagagcgcgtcaaatttgcgtggatcttcattataccgagatatccagtcaccttcatttttcttagcagtgtttgcgctaatccgccatacttgttttttacctggggtggaaactttgatggcatttgaagaaatcttcaatgtatcccgcatggcgcctaattcatcttccatggcaaccaacttgtaaacagcaccaagtgctggttgatcataagcagtgatatacttggtcccaatgccccagacatcaattttagcgccttgcatctttaagttagtaatggtgttttcatcaaggtcatttgaagcaaaaatcttggcatctggatagccagcatcgtctaactccttacgaacttgcttagaaatgtaagccatgtccccagagtcaattcgtacgcccaagaagttaatcttgtcgcccatttcattagccaccttgatagcattaggcacaccactacggacagtatcgtaagtgtcaaccaagaaaacacaattcttatgtgtttccgcatatgccttaaatgcgtcatattcactgccaaatgcttcaactaaagcatgagcatgagtccctgaaataggaataccaaacaatttaccagcacgaacattactagttgaatcaaagccgccaacataagcagctcgagcaccccaaatggccgcatcggtttcttgcgcacgacgagagccaaactccattagaccatcatctttaacagctaacttgattctagcagctttagttgccaataaagtttggaagttaataatatttaaaatagcagtttcaactaactgacactgggcaagtggaccttcaacttgtaaaattggttcgttagcaaaaaccagctcgccttccttcattgaacgaatagtgagctttaattttagattgcgtaaataatcaataaagtcatcatcgtaaccttcattttctttcaaatattgcaggtcactttcggtaaactttaaattctttaaatagttaatgatgtgttccaaaccagcataaacagcataaccgttgccgaatggttccttgcggtaaaaactttcaaaaacggtattgcgatcagcaatccctttcttgaaataggtatacatcatattaatttcgtataaatcagtgtgtaaagccaacgaatcgtctttggctaattctggataaaacattgcttctctttctgtcattaaaaattaacaatttcgtttttcattatacagccattacagtccattggctattctcaaaactatttttacctcaaagttagatacactttttcaattgagtccaattgatttttaatagaaaaatgctcttccgcataccgcttttctgtattagccatctggcgtaactcttcatgggttttattaacggccagattaatctctttagcaattgaatcaatgtctcccgttttagcaatgaaaccatattcgggtcctggaatcattttatgaatatcacctacatctgtggacaaaatagggattaaattgtctgttgcctctaaaagcacaagtggaaaactctctgaatatgaagttaggacggctagatcaattcgcttatataatccgctcaattggtgttgagtcataaaaccgtgaaaagttacttgtggtgccatgtccaattgccgcgtcaaggccttcaatgcttcaagctgactaccaccacccgcgatatgcagacgaatatgctgatcatctaattttttcacagcttttaaaagcaattcttgtcctttaaccttttccgtacgagcaacgttaataatattaaaataggtatgttcatatttagctggaatttcactatcactgtggaaaaagatgccattatagatgacatgtaccttgtttttatccacatgtgcgcgattaattagtagcttggcaaaacgctgagttactacgaaaatacaatcagcttttctcaacgcacgtaaattaagtttagtaaaaatattgccaatgattcccctaccttcaaagtctagataaggatctgaatgtacagtaatacaccaagttgcacgaattcgcttgtgaatcaaagataaaaataagttggcacgcgcaccatgagtatgcacaatatcatagtgcccctcattgataaacttagtcagtctacctaaactgcctaagtcataacgactattagctcctagcacatgtgtagtaatcccagccgctcttgctgcttgtgctactggtccttctgccagcgttaataattcaaaatctttgccttcattttgggcttcagttaacaaattaacaatatgtgataaaccgccgccattttctaaaccagcatttacatgcaaaaccttcatcttagtaaaattattttcccttcttttttgactgtttaactcgcacaacaaactgtggcaaaactaacatccgcttaaatctgctaggattagtaatcaagcgataaaaccactctaaatgcgtcttttgaaaagcttctggtgctcttttaacgatacctgaaaagacatcaaaactgccacccacacccatcatcaaagctggtgtttcgttcttacgtaagattgataatagtttttcttgcttaggaaaacctaatgctgcaaaaaccatatcgggttgtgccttctgaatgcgccgtgccactagttccaaatcttcagtaaagtagccgtcttctgcaccaactagattaatatttgagtattccttagcaattttgctttgtactgcatgaattacttgtggcttagctccaattaagtaaactcggctaccacgatcgctagcaacatccatcagccaagtaaacaaatcatatccagtcacccgctcaggtaacggctgcttaagcattttagctgcttttacaatgccaatcccgtcagcagtaatataatcgggatcattttttagaattttcataaattcaggattctcgtttgccgccatcacaatctccggattagcggtcacaacaaaggtcgacaggtgattatttagtcgattaataaattcattttggaattggttaaaagttttattatcaaaatcaacacctaaaatattaactttgctcattttcacacctcatgcgttttcttatctagtttctattctaccattccgacacgcaagtacgagaaacatgttcaagttttatattttattcaaacatgataagattgttttaataaaggagaaaaaatgaaaagagttattacctatggcacctttgacctacttcactacggtcacgtgcgactgcttaaaagagctaaagaattgggcgactatttaatagtaggtttatctaccgatgaatttaacgaattcaaaaaacacaaggaagcctacaatacctatcctgaacgtaaatacattttggaagctatccgttatgtcgaccaagtcatccccgaaaaggattgggatcaaaaaatcgccgatgtacaaaaataccatatcgacacttttgtcatgggcgatgattggaaaggaaaattcgacttccttaagccttattgtgatgtggtttacctgccaagaacgccaggaatttccactactaaaattaaagaagatcttaaataaaaaaatactccaattccattcaatttgaatgagattggagtttttgtttacttagaaaaagtgaattcaaatcgttctgcaacgtaacgtgcgcgggtgtattcgaatggttgcccatctgctagttcagttacctgccgtctagtaattaacggttcaccttttttagctttaagaagacgcgcatcttgctcgttggcaattgatgcagaaatatgttccgtcactcgtcccatggcaaaaccaccgcgcttttctaaggttttatataagtgcgttgaaacatcttctttagaaaaattctttactaagtagtatggcaccgttacgacttcataacaaattggtgtcttatcagcgtagcgaatccgctccatccgcaaaacgttctcattatcttttagcgcaagacgctctttttcagataaagatggattgccaatctgataagaaatcagcttgctcgaaggaatttgtccattagctttagtaatctcggtgaaggacataattcctgacattttctcttgaaccttttgactagcaacataggtcccgctgcctaagcgccgttctaaaattccttcatcttctaatgttttaatcgcttggcgtaaagtcattctcgaaacgccaaacttaactgccaattgacgttctgctggaatacgatcccctacttgataaacgtgattctcaatatcacgcttaatctgattgtgaatcttgatatacatcggttcttccatagtcgccacccccaaagtttagtactgctattattataatctaaattggtctagcttgcattaataacactgcttcaattttacagactattttttcttagcggtccacttcactccaagaatataaacatttggacgcttgttatattccacttcaacttgttcattatcattagcaactacactggcactaaattttgcttcatctttaacagctaagttagcctgattaggattcagcacaatattgtggcccttcatattagcttcaccgctcaaagctaaaaagtactcatagttcatattcccagtgaaggtaacacgtgtagcatcacatttcgcctgatcttgaaaatctgcatgagctaaaattacggcattgttcattgtaacttttgcttcatcaactactatcattcgattgatggttgaattttgaatgattgtccgtgtctttttatcaatataaaccccacccaaaaaagtagaattcataatattgctccagcagtcatcacttaaataaaggcaggaatcgctagcagacttaacttttgaattaagcatattcatccaagtttgcccatgcagtaatacataatctacttccgaattattaagatccaactccgcattcgttttggcaaaagtattaatactgccgtgaatctttgaattatttacaattgctgttccttcgccttcaattgccaaagcacaatatttgtccgagaaataatcaatttctgaatcattcatttccaaacggaaattggcatggtcatacatggaaactgaaccgttaacaattttggttgaataaagttccaacgtgatcttaccattaaccgcgatagctgctgtatcagttcccgtgcccttaataaagcaattacgcaaagttaaatagccatcaacgcctactggtacagctaggctattatgttcggtagttgtatcaatgcataaattttctaaagttacataacgactatcttctgaaacactaatatagccataaatagtcgtgtcttctggcaaagagcctgttcccttaattgtgatatctgttagtgtgatgccctgcggcaaataataatatccggggcccagcatcaacacatcatcggcacgcaaatcctttaaaacctcgtgccaactgactgaactgctagatccccctactctaattatcctagccatccattatcctttcatctcgtaaaaaccgattactattgtactaattttctttaatttatgttgtatttttgctcatcaaaaaagctaggttcgattcctagcttcttatactatttcattttaacattccagtaataagccacattaccataaggagaaagttggaaacctttcactctcttattcaataagtatgacgtaccttgttggaatagtggtgccgcaaaggcatccttttgaattaattgtttttcagcgttaactaaggcattcaatctcttctgcggatcagtggcataagttgaacgagccaagtcaatttgcttccagaaattggcgttgtgataatctggcgctaaattaaacaaaccaccaactgtcaagaaatcaattggatcttcataacttggctgccaagttccgtaaacaaagtcgtaattgtgattagttgtgttagatagccgtgacttcaaaggaattgaccgtacccgtagagttagaccaggtaaatttttcatcaaattgctttgaataaattcacccacacgcttagcatcgtcaatatctgaagtaagcaattctaaggttagcttcttcttacccaattgcttcaaaccaagttgccattcctttttagcttccttggcattataggtaaccaagtcgccagcatccttgcggtaatcgttgccagttgcctgatcggtaataaagtttgcggcaacaattccatttgacaccttgccttgatgcaaaacggtcttgactaactgttgcttattaattgcccggctaatggcccgacgaatatgaacattgcctgtactcttacgcttcaagttgaaagaaagataaccattagttggcgtaactttggtatgatagctagaattattttgatactgcttaacaaaatcagaagtcaatgtcgtgtaatcaagttcaccacttctgaacaagttaaccccagttgaaggagtttgaaccacttgtacgttaactttattcaaatcaacaattttcttgttccagtaagttggatttttcttgtaagtccacttcaaatttgaacctgtccaaccagatacggtaaatggaccattgtaaactagattcttactgctagtcccatacttagagcctaactttttaaccaatttagaattctgaggatagaattgtgcaccctctaagatttgtggcaaatatggaattggattagctaatgtaacttgcaccttatacttgccgagtgctttgattcccaatgaatttaccggtgctttaccttgagaaattgcctcaccgtttttgataatggcataagaatcggcatctaaagatgaattttttgggtcaacggttctgcgccaagccgttacataatccagggcagtaactggatcaccgttagaccacttagcattattgcgtaaggtaaaagtatagaccttctggtctttagaacgttcaacttttgtcgcaccagctaattctggctgatttttcttattaaaacggtaaagaccttccatggaattctgcaaaacttctgaactagtcgtatctccatacttgctcgaatctaaagttgaaatttcatttgtgacagaggtattcattgtcttagtcggtgcagcattactgccattgttagagcaagctgccagcaccaatgcggcagctgctgtcatcactcctgaaaaaatccattttttacgtctcaatcttctcaccctttacttactttttgtttaatacttacattttacaagtatatctaatacggaagaaatttcaaatactttttccgtataatagctataatcaatacgtatacaaaaatggcaaaaaaaagaaacgtcacataggacgtttcttttttcgggttgggtgttcttttagaactattgggttagctggattcgaaccagcgcatgatggtaccaaaaaccattgccttaccacttggctataacccaataccagctgaactttttacttgtcgttcaacaatggaggagggtggattcgaaccgccgaactcagagagagcggttttacagaccgccgcgtttagccacttcgctactcctccgttagctgacttaattataataacgaaaatccaaatcaaatgcaagacttttttgaaacttttttcaaaaaaaagaagaagccatgacgacctcttctcaaaatttaaaaattgatttatatctaaacagttaattttaagcctaatgccttttgtgctacttgatttaccagactccattgcttgtcataagttggtgaaaagaagaaatctgcttctgctaaatcttccagtgtcaacttatttctaatagctaagctcaaaacattggcttggccattaatgtcatatgatgaaagtacgctaccgcctaagatttggtggctgtcttcattataaacaacagcaatatagcaagtaggattatctttttcaggaatatagtctggacgaagataactctttaagactgtttcttttgcattaattcctgctcgcttggcattcttttcactgagtcctgttgttactgcatgtaaatcaaaggcttcaagcaattgtgcaccaactaagcccttaaagacacgttccggcttgtcttcaaataagtgctcaacaacatattgagcctcatgccgtgcagcaatggcagatggcatcggtactcttctgttagctggaatgctaaacgggaagattgcatccccaattgcatagacatcctttacattggttctaaagtaattgtctactttaatgtagccattgtcataaagatcgatcgtgtttttcaaccaagcagtattcggcttaataccaactgtaataatgacacaatcagcagtaatatcacccttatcagtctgaactgcattgacctttccactgccaacaaagccagtaactttagtgttcatagccaggttaacaccatgatcagtcaattctttttcaaataagctagtataagtatcattcaaataattttctagtggtttttgcccaccgtcaattaaagtaacattcttgcctgctttagcgaaaacctcggcagctgcaattccgttaccagcaccaataactgcaacatttttaatagcttcatcttgagcagctgcattgatctctgtagcgcaatcatagcctctcatcaacataatatttttcaggtctgctccaggaagaggcaaacttgcggggttaacacctgaagaaataattagcttatcataactaacttctttggttgtaccatcttttacgtttttgacagtaaccgtctttttagctggatcaagagctgttactgctgtgttattaacaactttaccaccccgttcagctagatcttcaggagtaaagtttctaacgttgtctcggcctgtagtttttccttcaaggaatagcttcattccgcaagacataaaggaaacgaagtcgcctgcttcataaatcgtaacgtctacatcatcataacgatctaaaatttcataagctgcctcttggccgccgtgggatgcacctacaataatgattttcttttttgacatagcctgacctcctaataatgcagcaataattgtcgtttttaagtaatagcagttattgtaactggttacattatttatcttttaataagatatttcaattaatttgcttttgattagtgcgaagcagcaatatattttttatataaaaaagagcactactgatagtagtactctagagggaaattttccaaaattatcttatttagctaattctgctgatagatttcgttcactaatttagtgatttcattacgattaagaacttcatcatacatatccattgtttcctggattgtattttctaaattagtaccatgatttttggcatagccaatgaacttttttgcatctactattttagcttctttaatcgctttttctgcagctcttttagcaacttcattcatctcatattctagcttattcatgtcttcgacccattttccgctattcacgtagtagtcgatatccttctgcaggctgatatccctgcgtagtacatcatccgtttttctagatcatttttacgtgttgtttgcatctcaatatcatacactcgactttgatcatcttgtgcccagatatctaagcgaatgtttttggattctagtccaatgttgccgtcatactgggtaatgacattaacttttgtcaattttaattcaggaaacatccgacgtagcagttccagacaattctttttattgctcataacatgaccgaataccaagtcgttagtaattcgaggatatcgattaattcttctcctcatattttacctcttttctttttcttaagtaggaaaattaccctccactatttattacgcaaaaaagtgcaaattttttcagaaatttaaaaatttagacacgaaaaaagccgatgcaaatgcatcgactctttcagttaaattattctactttttaatagaagtttacagccttgatgtaacgcttattgttgtttctgcagccttcaattctgtagtacttcttgccgttcttaaatctcatttgaccaccgtaagtagttacagtttggcctctgtacatcttaccagtacctggagtacgacggtatgatgaccagtaaacgtaagcattgtgctttaaagtacgttggttaccggtaatgttagttacacgaacgtattcgtccttgttagctaccttgtagtaagtcttaccgttgatagttacgatagttggaacgatttcaatgtcattgtaagcatagtacatgtgacctaagtagttaccgttcgtgtcgtaagctcttgaatcaaccattactggcaaagtcttggtgttagtgtcaccagctggcttaacaagtgatgaagtcttaacccaaatgttgcttgagttagcatctgacttagacttagttgaaacttgtgagtatgatacattgttaagggttctagtttgatcagcaacgtaaacagtgtcaccatctttgaaagtagttgaagctggtcttacattaatgccataaatgtggtaagttgcgattgagcttgcgccattagcatatagagcttgtttgtggcttgaagtaattaaaacagtatatgttgcagtagtcttcttaccagttaaaccagttgcagttaaagttacattatagtaacgtcctgcttctgaagtattaacaggatttgaagttgcttctagtgaagcagctgtattattattgctgttttgtacagctgaaataataactggctcaccattactatttacaaaattagttggattaaattgtgaaccaacagctacttggaatatttgaccattaacactccccttgctttgaccattcaatgaccaattgatcactggattttgagtagtatctgtagttgaacttgaacttgaaactacaactgggatttgaacagtagctgtttgcgtagaagtagaacctgtaccagttaaagtaagattgaaatcactagttggtaccgcagtaatattcttgttatctttatcaagagttacacctgcattcttaagaatagcagcaacttcactatctttaaggttaactttttctccactggcattattcgtactaaagaaaactaatcctaaatcattaattgccttagtaacactagctacagtatctttagccttaatagaaatagtagttggtacaacattagctgttttatcggtagtacttgcagcatcaattacttgattgccatatgtaaagtatgatctatctgttggctttgctgttgttgctgtagtagtacttgtagtaccagtagtgttagttactgtacctaaactaatagcagcgttaactggaacagctgaagctgctacaggagcaactgccaacaaagcggcagcagccatacttacaattcttgtattctttctcataattatgtggcctttcctttctgaaacagaaattcatcctaagcagtaagttatatcttcttctgcttgtgaaataattatagcatgttacgaacccgattactaaaaacaggatcgactcgtgtgtgtgattttaagaatacttcctaaaatcaccagtaataccctaccctttatttgttaaactgtagttatcggacttttacaattaagattcaaaacattacatttttgtgaagttttaaacaagttattgatttatgacagaacttatgtgtgttaagaaaaggtaattttaacacttgttcgcttaaaaaattaaagctcttagattttttgattagaaataattgcttcatgttctttaatatgctcaactcgccctgcatcccccgcaataagtaacaaatataatgcctcaatcattgtcatacttgccacgcgtgagaaataatactgcgattgcatcaccgtctgccgcactgctgtctttaaatgcacatcagctaatagcgcaatcggtgaatcatcgcgattggtgatcgcaatcaccggcatccctttttgtttggctaccttaatttgcttaatgattcccgctgcttcccctgaattcgaaatcaccaacaagcaatcctttttactcaggttcattgtctgcgcaattgccgtttcaatcgtgccacctgaatcaattgccaacaagccaatctgattaaacttatacactgcatcagcggccaccggataagtatcgccctccgcactaacctgcacaattctgctttcagtcaaaaaatgcagcacctgatctaatttggcttcagtcacattctccaaagtcgccttaatctcggcgactttatttttttcaatcaattccaaattagcactagcatcatcacgtgacatattttgaagtgacacactttcagttgcattctgagctagttgaatttttaaatcatgaaaacctgtcaaatctaaattatgacaaaaacgcgtcaccgaagcatcactcaccccagcttcagctgctaattttgaaatcgtataatttaccacctgttcgggccgttttaagaccacttgagcaatcttctgatcgctggctgacatcgtagataatttgctatagattgtatcgataattttagtcattattttcaccttttctgtgccaaaattatatcatctatgtaattaattttcacagctttatttttaaagaaaataaatttatattttgattgacgaaaatcatttaccaaggtagtatatatttgtaaataattttcataggagaaaataaaatgaaaattaattcgataagtgacctcgctttaagtaaaatcaagccgaaaatgactatttctcttggcggcggaaataatgtatttaagttagctcaagcgattgcacagcataacttagacatcacattatattctccatccgaacttactcgctttaggtgcaaagaactcggattagagcttcttccatctactgcagcgactaagatcgatattgcttttgatggttgtgacagcattgataagaattttaacgttctaaaaagtttgggtggaattcatctttttaaaaaacaggcagcacaaattgccaaacagtttatcctactcttacccagtcaaaggatacaaccgattctgaatcctaaaattccactttgtcttgaagtggcaccgccttgtgttaatcaagtacagaagtatttaagcagtttacatttaactagtaagattcgacaagatagttcagtagctgcatttgcccgtacgcctttgggcaactacttaatcgatgtttttaacgaagattggcacaatatcactgaacttaatcgtcaactttgtttacaaaatggcgtagttagttcttcactatttgaaaacttaactacttcattaattactgaaaaagacggagaaattattgaacttaagagaggtaataatcatgaaaacatttaattggggaattattggtactggctggattgcacatgatatggctgatgctttgaacaaagtcaacggcgaaatttatgctgccgccaatccaaatgaagaagcactacatgcctttgtccaagaaaaacacgtgcaacatgcattcactaatcctgatgaaatgatcaatgatcctaacgttgatatcatctacattgctaccccacacaccttccactacgactacatcaaaaaggccctcaatgcaggcaagcacgtcttttgcgaaaaggcaattaccgtcaatgcgcgacaatttgatgaagtggctcaattagctaaaaagaaacacctaatcttaatggaaggttttaccctttatcacatgccaatctaccaaaagatgcaagacatgattaaggctggaaaatttggcgaaattaaaatgatccaaattaattttggctcactcaaggactatgatccgcagaatcgcttctttaataaggagctcgctggtggtgcattgctggatatcggcggctacgcaactgcttttgccattagtttcatggatgaatatcctgaaagtatcaataccacggtaaaattctttgaaactggtgttgacgaagaaagcggcattattttaaaaaattcgaaaggccaaatggcagtgatgtcattatcgatgcgggccaagcagcctaagcgcggactggtttcgggcaccaaaggttatttcgaaatcaatcaatatcctcgcggcactgaagctgatattacttacacccagagtgctcatgaggaaagctatgataaggttactgccggggatgctgatcaggcgcttgaatatgaagtcactgattttcaaaagtatattgaacaaggccatgacgaaggcgaattggaaaaatcgcggatgatcgctcacattttaaccagcattagaactgcctggggcatgacttatccatttgataacgaggaataattagttggatttcaaaagggatcgatacataacatcggtcccttttatttgcacttattgcttattttctgcgacatatttttctagtcgtttcaagccttctttaatctgatccatcgacgttgcgtaagacaaacgaatatatcctgctccacctttagcaaaaaatgagcccgcaattacagcaacatgcctcttttcagccaaatcataaataaacttggtatcatcttgttccaagcctgctggaattttggcaaaaatgtagaaggcacctttaggcttaacgcattcaaagcctaacttggttaatccttcataaagcacatcacgccgcttttggaattctttcttcattggttccgcatcgttcattccattgcctagtgcttcttcagctgcatcctgcattggcgttggttccgtcgttgtgattgcttggtgaatcttagccagttgatccaaaatcggcttaggcgcagctaccacaccgattctatagccagtcattgcccaagcttttgacacgccattcattaaaacaactagatcatgtaaagtcttttccatcgaagcatgtggctgatcataattgagctcactataaatttcatcacaaagaacaaaaaccggcttatctcgaacaacatctgctaaggcatcaagttcatcttgtgaatacatcacacctgttggattggtaggataattcatgacaagcgcctcaacgcgatcaccatacttgtccaatgctgcttgcaatttatccggcgttaatttgaagtcatcgtcagaagtgtcgatttgttcaaccgttgcacccatggatagggcatccccaatataaagcggaaaaattggtgttggcaccaaaacaacgtcgcctggattaagcaccgcagtcaaaaagtcgtagatcgactccgttaccccattggtgatcaaaatttcgcttgggtcgtatttttgtccatatttttcagctaaaaaatcggctgccgccttgcgcaaacctggagtcccgttagatggcgcatagtgtgaatggttattagcaatgctggcttcagccgcttttttaatatgctctggcgtgttaaagtcaggctcaccaatcgtgaatttgacgatgtccgaaatcttgttggtgtaagctgcaaaggccaaaatctgccctggcttttgttcaaccaagccttttttcatatgttttgttaagtcgaccatagtttttcctccttatatcgaactaaatcaattcaaatataggagtctttttaatctttgtcaaaggaaatattaattttgatatctaaagtgcacattaaatccaataattaacaaagcataaatactataaatagccgtaacagtcggatacattgcctgatactttatcagcaaaagaataattaaaactatcgccaaaacaatcgttaatattctaaaacgttgaaaatatgacaaaatcggtaaagccactgtcaaaactatatcagttattaagatagtaaaatccaccggatatgatttgatataaaaaaactgaaatattggcaatgcttctaacagtaagaagatataactaataatcccacatattaaaagcaactgattaagtatctttttatagtctttcattaaatcaagaacttctcttttttcatgtaccagtgcttaaccagagtggtcaatgcaatgtacaaggtcaaaagtacaagaactacgagaacataatattctgggatcggaccgaatttcattaccttagccaagcttggaatgtaaggcattgcagtaccgatcaatcctgcaccgatcgtagcgagcattactacgcctgaagagtgctgttgtaagaaggaaattgctggatcacgcaatgcttggataaccatttcctgtgtccagagtgattcgatgaaccagccactccagaagatggccataaagacagccttttgccctggagtagcagccacataacttgtgcccacagtacttggacaaatccagaagtaaagcaaggcaaacgtaatgatatcaaagattgaagatgtcggaccaaagaagaacatgaacttaggcaacttctttgtctcccacttacgtggtacttccaagtatttttcaccaactctatcaaatggaagtgacaaacaagatgtcccgtagatcaagtctagaatcaacaattgcattggcagcattggcaagaatggcaagaatgatgatgccactaagattgacaaaatattaccaaagttagatgacaaggtaatcttgatatatttcatcgtgtttgcaaagatctgacgcccaattcttacaccatgttccaaagtacgtaaactcttgtgcagcaagataatgtccgcactcttttttgcaatatcaacagccgtatcaactgagattgctacatcggccttcttcatggctggcgtatcgttgataccgtctcccatgtaagcaaccgtgtgaccattttccttcaaaatctgaataattctagcctttgactctggtgaaagctttacaaagaggctacattcttcaaccatctttttaacttcatcgtcgctcttaccagcaaaatctttttcactataaatgtacttggtgttcaagcctactcttgaagcaacactcttagttacagcagcgttatcaccagtcaaaatcttaacggtaatatcgtcttgctttaacttcttaagcacgtccttaacatcatccttaggtggatcaaggaaggccaagaagccagttaagatcaaatctttttcatcgctaacattgaattcaccggcttgagcaggattgttcttgtaagctaacaaaacaactctcaaaccatctttgttcaaatcttcaatgtgctttaaaactttttctttgtaatcatcagttaaatcgttgatgtgactgccaacttgcacacgattgcagcaagcaagcatttcttcggcagcacccttagttaccaggatacgaccatctccgtggcgcttgaccacgacactcatgcgacggcgcttgaagtcgaatggaatttcatcaaccttagtgtagtcgtgtttaatttcattaacatctagctcatcgctagcggcatcgatgatggcttggtccatcaaatcgtgcatccccgtttggaagtacgagttcaagtaagccaagcgcaaaacctgtggattttccttcatatccaagttgtagtgccgttccaatacaaccttgttttgggtcaaagtaccggttttatcagtacaaagcacgtcggcggcaccgaagttttggatggagttcatctttttaacgatggtgccgtgcttcgacatttctagcgaacccttaaccaaattactagtaacaataactggcaacatttctggagttaaaccaacggcagtagcgatggcaaacaacaaggcgttgagccagttacctttagttaaaccgttgatgaccaaaactaaaggtgcaatgatcgcggtcattgttaacaataatttagaaatgttcttgataccaacatcgaaattagtttccttaacgtcgttgtttgaaatatccttagccaaacgaccaaagacagtttgttcaccggtggctaaaacaacgccaacacctgaacctgacacaatagttgttccttgatagattacatcaggatagtccaaatattgatccatgtctttttgatcgggcctcttagtcgcaatcttttccacaggcgttgattcaccgttcaaagaacttgatgaacagaacaagtctttagttttgagcaatctaatatctgctggcaccatgtccccagcgtggatattaataatatcgccgacaactacttgcttggtagaaatttcttcatccttttgattgcgacgaatattggtagttacagacaccatatttaagagggcttcaactgcgtcattagttttcacattctggataaaggatgttaatccagaaataatgatcatcgcaatcataatgatcacagtactcaggtccttttgatctgccggcacgaagacgtagtcggtaaacagcgacaccgtcgctagcagcaacaggaccattgtaaaaggagtgaagaatgattcaatgaagaaatgcaatttcgtgttgtgcttcttggtagcaacttcgttaagaccattcttctccaaacgctctttagcttccgccgaagacagaccgtctagcgaactatgtagcgtctttaacgcttcttcgggagtttgcctagcgatctgcttaacaaactctgtatcggctgtcttcttattaatcagcaacttgttttttgccatgttaatcacactttctgattaaacacgcaaacaaactaaaaaggagccaataccaattagtattaactccttatctaagcgatgtttcctcgtcgttcagttttgacactacgtgacgtaagcacaggctagctatctggatctcgccttatctcgacaagaactattttactcgttggcatctctggatgtttccgggcgatagcttgtgttcacgtaggagcctcacctaacagtttatttgctttttcaattttcatttttattatatgcatattatttgacaatgcaattatctttactaaatcgttagaaattgtaaaagaatttaagaatgataaaaaacacgtgtttgcaatgaacacgtgtttttttataatttaattttgatatactattctatagacatggatatgttgcaactatttgtgtttagtagttttagcataactaaccacccctcacacattttgaaattacggcggtgagagttatgcataaacggatagtttggaggtttagtgctccgtggtagcttgggctattgcaatcagcatcgttctaggtgctttaggcaatttagctatcaatttggctatagcctatgcgataacaaaaaaagctaatcgcaaggattagctaaaccaacagttatctgaaactacgatcgaagtcaacggattgcggccgtgggcttcttttcatatacagattataacatgaattatccgaaacgaataaaaaagatcaggctcactgcctgaccttgctattgggttagctggattcgaaccagcgcatgatggtaccaaaaaccattgccttaccacttggctataacccaatcttcaaaccttttacttgattggttctatttgaatgacctctcgatcacccaacagatattagtataggggaatgaagaaaaaatatcaaggaaaaattcaaaaaaattttgattttttcacatttgctcgaaggatactgaatctttcttttatgaattataaaattaatttgtttttttacgattataacttttgtgacttcttaaccttattcattaattcaaagtcgttggtaaaaattccagctacaccaagtttaaagtacctttttgctatgcttactttatctactgtccaaattctttgcgtaactttgctaggtaaataccaatgcggatggatcgctgcaaaatgattcttagccgcaaactgttcaggaaacggcaccggccatttgtttaaaaagcaatattgttggtggggatcaattcgctggcaattttttaaggtttgataattgaaggaagagaaaataatgggatgcacaaaatgatattcttgtgctaacgccaaaacgatggcttcaatcccctcatcatgaatcttgttagtcttaaattccaagttaacatacaaatcctgtccctgaagaatttcaaataattcacttaacatcggtaccggttcaccgttagctaaacgaaatcgcctgatttcacttaaggtatagtccttaatataacctgtcccattagtagttctatctaacgtttcatcatgcattactaccggcactttatctttagttaagtgcacatcaaattcgacaccttcagcgccatgcgttgctgcatatttaaatccttgcaaagaattttccgcaaatttgaccggtaagccccggtgagcaaaaataattgtctgagtcattttttcacctacaaaaaaatgccgctctcgcggcatctgctctattttaatctaagacgattgcaccttgagttgccaaagtatcacgaactagattcttaacatctcttctaactaccataccatcggtgttctcaacgtattcaagatattgagctgacttaatatgtgcatcataagccttgtcatcaaagtaaacttcgacaaaataccattcgttttcgttcttcttattgactccagacatcataatttccatgcctggttcagcagccatgctagtcgtcatttctttcttaacttcatgcgcaaacttttctgcatcttctggtttaacttcaactttaactaagcgcattacaaaatgatctgcgttatcattcaaagcatcatgagcctttgtggtaataacttcgggctttaattcgattacttctttgtctgtggaaatcttgtcgatggtttctgcaaaatcatcagcatgtgctgctgcaatgtgcaaatcttctgccaagctattccggaacaattcgatttcgtaattgtcttcaccatgagcatcgtcatgtgcgcttccaattaacaaagttccttcttcagctggaattgagttgtgcatgttattttcaacttcacggatatattcaccgcgatcgttttccttgatatttaatttagtaattctaaaaattggtgtttcatccatttttcttgcctcgtactataatctttccacacctatcattataaactaatgcagaaaaataaaagcccctattcaccagttatttgatcaattttaaccgctttagctggccattcagtccgtacatattccaatgtactgccttcattgcaagttaactgcacaaaagaacaattgggcagacctaaaaattcacgatggttagttttttcattaatgtattgcgacaaactatcgccatgaccaacaactaaaatattatcgccatcttgtgcatcccgcatgatcaagttaatcccgcgctccattcgctcaactacctcatgattatcttccacgcgaaatttgcccaaacgatgcagcggccaaagtagcacattgcgtgcctcaaaagcgccatagcttttctcttttaattcctttaatcgaacatactccatctcaggcccagcaataatctctaaagtatcacttgccctttcttggggtgagcaatatgctctagcaaaattaattccctgatcttgaaaataatcccgcacggcttccgcctgcttaatgcctaatggtgttagcgctgaatcacagcttccctgcatgcggtgtcctttattaaaccaagtttgaccatgtctgactaaatataaattaattgccatttcgtcttactttaaaccctctgctggccacacgtatgaatcaaaatggatctttttaccatcaactgttagcttcacgattgaagcattgccaaaaccgccaaagttcttattctcggtagcatcgcgcacaaacttagctaaaatatcaccatgtcctacaactaaagcagtttgaccatcctctaagccgcttaaaatctcgactaccgcacggtgcattctagcaacaacgtcttcgtctttttccatagttgggtctacgttaggattattataattccaaggcaataagaactcatcacgaccttcaaaaatgccataacatttttctcgcaggtcttttaaacgcgtataaggcatttgatgatcagtaataatttccaaagtatcgcaagcacgctcttgggttgatgaaaaagctttgtcaaaatgaataccctgctttttaaaataatcacgggccatttcaacctggcggatgcctctttcattcaatggtgaatcacaacgtccctgaactttatggtaatagttaaaataagtttgtccatggcggactaaatataaagtttttgtcatattttcctcgctaaatcgttttttcctttatcttatcaaaaaagcacgcgtcgtgcgtgctttcatattttttcgttaaattttgaagttcttgttgtattcactcgaatttacaacaaaacttggcacactaatgaagtgcattgagtaaatattgccagtcttggaaatgctaaagccataataattgtagtccccatcatgacgtgagccctgtgtattaaataaatcaccggcatgttcccattcgcggtaaaggctcttatcattacgctgattttccccagctcctgcaaagccaaagatcatttgcttcaagccaaagtaaatatttcgcttcatttcagccatagacataatcttcttattagtagaaaaaccagccatatcttcgacataattatcgtttaattctaagccatgtttcttgcaagcccgtacaattccggcaacatagtgatcgccatctttgatactcttgccattttgctcgtattcttgcgcaattgaattagctaaggactctactccagaactataaacccacggcttcaaacctaattgactacgagcactattaattaggcacaaagagaattctgccagttctttttgctcactagcagaaagatcggcaagattgatcattttttgatcggctttgctttcacctgagctaacacgtgaaaagtcgttttgctccattcctttcatgcaagcctgaataaaactagcacttggcttccccttatatgcttgcaataaactagctttcgtatagccactcggcatcttcattgtagctgttacataattctgcgttgcagcagtctttttaacgagtttggcatttttagctaataaccattgagagttatttccaatcttataagccaaatattttttcttgcccagctttaaatactttttagcagaataagaatactctcttttagctacagcataatacttagacttcttgcccttatttgtataaagtctaactttctcagttcctttaacctgaacttttcccttaactgctgcttgaaccgtttgtggtgtcgtttcgtgtattacactagccgtccccatcaggcaaacactagtcaacaaagtcacaattaatttttgcttcatagctgttccactttctgtatgttttgattattaatatttgttatttaaattatatcgtatttatttaattaaaaaaatcaaaaagagacacactatcattttgacagcatgcctcctttaagttagtttgattttatttagttttgaaaagaggtttatttttagtaccagccgtttgcttgccagaatgccttagcagcagtccatgagccataacgacctttgacatagttatcagctactcgctcttggttagctgctgaatagtcaccattcaagtatgaagctgaaagttggtatttaccaacgtattgaccatttgaagcactgtatgagccaccagattctctaccggcaatccattccttagcactagcttctgaaccacttacagttgaagtagtagtttgagcgttggtgttatttgctgcagtagtagttgctgcagaattagtattttcagtttgagtttggtgttgtactggagcttgggttacagcagcttgagtgtggtagccgcgagttacatacttagcacgaacccattggttcttgcctaagtcataccacttgtgacctttggcatcgtaagcagtcttaattactttccatgaggtgttgcttgccaaagtttggccagtagcctctggattcttgtagctgttgtaaacagtgattgcgttgtctgaaacgttcttaactgttacaacagctgtatcgttttctacaatagcagcttgagcagtattagtgttgttattagctgctactaaacctgtaactgataaagcagttactgcaattgacttaactaagatagatttaattttcaaaaaaattctctccttaaaattttaaaagtcataagtaacgaattttcaccttattcgtccgtcccattcaattgacacagcatatactaccttgcttaaattgcagaactataacaggaatatcacctgcagattaagaaactattgcaaagtatgtcaaaattgtaacaattgtaatatttatgtaaatttattcagatgatacaaaaccgcatcagatcgccatttaactcgatttttaatttttatttgctatgtgcaaaagcttgttcgcatttaatatattgaaacacttttgcaaaacgaaaaaagaaagagtttcctctttcttttttaattctcacaaattttttattaatttattccattattctgccttatcctcttctataagttgacgtttattaagtgccgcaataaatggcaggtaaatcaaaatgtctaagataatattgattacttgcaaaattgagcccgcaatactgcctgttgccaaaaaaactgaaataattggcggcattgtccaaggaattacagtcccattacataatagaactaagcctaggttcattgcacaataagtggtaatcgcatttaacattggcgcaatcataaatggaataattaacaacaagttcattacaactggcagaccaaacatagttggttcattaatattgaacaagccaggtacgatggtcagtggtgctaaaactttattttgtttacttgcgcgcttgcgccatactaaatatccaatgcaaagcactaacccaatagtggcacctccatcacccatgtaaacaaagttatcgataaatggttgcgtaacgatatgaccaccatgagctaaatctaagttacctgcttgattcaatacacggttagcatcggtttgcatcaaccagattggttgcatagcagtattaactacgttaccaacatgaataccaacgaactagaacaagctcaataaaataattgaaactaatgtaccaattaaggtatcgcctaatgcacctagtggcttagccaaaatattcatgattacatcgtgaatattgccccatccaatccaagcaaaaagccagtaaacacagccagcaatagcaattacagcggcacctggaattaaagctgaaaagctcttagctacagcaggtggcacagtagctggcattttaatttggatattatgattaataaaccattggaaaatccatgcacttaggagaccaaagataatagctacaaataatcctctactacctaagtaagtgtaagggaagccttcaactggaactttatctccactcataatacttggcgtcaaaatgaagaatacagctgcagaaacaattccggcagaaacaccatctgtcttatattgattagcataactccaagcaattccaaaagctgcaattaagaccatgatcccaaaggagccattagtaatcttggctaaaatctgtgccaggcttataccatgaacagcagtttttgatagccaatcagaccaaccggcaactggaaatgaattaatgatcatgaataatgatcctacaataattaacggtatagccatggcgataccgtcacgaacagcaattaaaggtttaaaactgcctattttagcggctacaggcataatgtgtttgttaacaaacgcattcaaacctccgctcgatttactattagccataataattccctcttcaatctaaaaatgatctcgtgtttctttggtatatacctttcgcaatataacaatatcctgaaagcgattttattaccactattttaaaagataattttttgcttatatttttaaccaaagtttgattaacaaaatattgcagttatggctgtaagtgctatagtttacatgtaatcataaaaaaagcgaggaaataaaattatggctaaatacgaagtaaagttaagcgaagaagatttacaaatgatcaaagattgtcattcaaagaacccttcaatcatgaaggctatgaacgaagccaagaaagtcgaagattaagcaaattttgatctctaaatcgaaaaaaggcgtccgtaagggatgccttttttattggttttcaaatcttgtaccgtggggatgcttccagttataaacacggactattttacccatgccatctagcactacaacatttccatcattatgtggataaatcaatggatcagaatgtgaaccaccgtcagtaaaaattcttgctggctcacctgggtattgcactgttctaactatacaatcatcaattgatagccgcctcatttgtcgaccatcatcatattttccttctaaagcagctgttggcgtatgaccagtcacaattgttttgcccgttttgttatgagccatcattttcaataaggaatcggaataccaatacttatctcgtgcccaaatacggtaaaaatcatagtcaaatttcaagccatactctatctcagagtaagtttccggatcattatactgttcatctggccgcacacccgcatgaacaaaaatcaagtgtggcgtttcatacataataggacagccttttagaaagcgataatactcactatcacgcaactcatcaggcaaaactgtactgccaaacagactaactaggctcttgccaccaccgttataaacccaaatgccatcttgatgttcctgcttctccgcaaaattgagtaacatttgctcatgattacccagtagtacgattgctccttcgcttttttgctcaattaaataatccaatacttccttcacatgctcgcggccatcaacatagtcaccgcccgcaactaattgtgcttctggaaaatctgctgttgcctgcttgattaagtctaaggtttctaagttgccatgaatatcagaaatgaagatatagttctccttcactcgatcatccaacagcgttcgattgataatttttttcatttcatactaccccatgtgctaaattaaactaacatttttttcttaattatagcagatgtacactggttctttttctatgcaatcctaaaattaacctccggcaaaaaaaaggctacaatagatatgaaaagaagtgattgcaatgtttaatgaagaaaatgcaattgatgccaaggacttacacgttgattctttcaaatatcaatcaactgaagacatgccatctgatgcttattctagctgggaagaaaaacacccaaacgccagggtattcaagcttgaatttcgcaacatcggcgaaagcaatgaatggcaggaaatgatcattatctacactgaataaataaaaagtggaagaactccaagcctagtgtgtttcttccacctttttacttattttgattttctttttccttcaatttgtgcagaatccgttcattttctttagtacgtttttcaactgctgcatcgatgatcgaatcaaaccaatgattatcagaatcatcgcttgtttgatccttcttttgaggaccttcattttttacacgtttgtcagtttcttcattaataatggaatccagccaatcaaaattatctggatcatggctcttatcagtcatttatttttcctccatttttgatttaaattaatttatttactattctttttgactataattgagttaacaagatgaaacaagaaagaagtgttcgaaatgaaaattacattcactgacaaggcgcttgactacttaaaaagacgcgaaatcttgaataaaattctaattttaatcgccgacgatggtggtggtaaatattctatcaaaggcggcggttgtgcaattggcagtcacttttccattatttatgtagacaaagttgatcctgattatccaatcaagcttgaaaacgaccaaggaatcaatatttacacttctaaatacgacaccacaatgatgggaccaaatttagtggttgactacgccaatgcatccctcaacttaaagagtgacgaaggattgcttgatggcggcgttgatatcggcaatggcgccgagttaattaaagctcaaaagaatgtaaaaatgaccggcgttgaatggcgttgctagattaagatgatcagaaaagacagtagtttgaaatcaactactgtcttttttctatagaaattgaccactattaggatcgaatccagtacgatctgccgcggtaatctttctaattaccttgcatggattccccgctgcaattacattatctgggatgtcattcacaactacactgcctgcaccaataattgaattacgtccaataattgtatctggagttacgctaacccctgcacctagccagacattgtcaccaatgccgatcgaatgtgcaacacaaccaccggcttttcgctcggctggatcaaataaatggttgctggtatacaagccaaccttaggaccaaacaaaacattgtttccaatataaacaggcgcgccatctaaaatcgtgcaatcatagttggcataaaagttatccccaacatgaatattttgtccaaattcacaacgaaaattagggttcacgaagggatgctcacctgttgaaccaaagagttctttgattaatatttcttttttagcgtgatcattctcattattaatattattggtcttcaaggtagcaaggtctctcaaggtgccaaggcgaggatccgcatcattataaggacgaccagtagccatgtaattaaattttgttctaagcgacatgattctttcctttcattagttcttctatttttattatagaaaagaaaaagcgctttcgcatgtttgacgcataatatttagcacactagccctaatcttattgcttattctataatggtaaaaaagaaaggattaaagccatgaaaaacttcaacaaatttaccgctaaatctgcttgccttttacagaatctactagtagtctcaattggtttactcgggattattctgatcatactcttattccgcgatctaattccactttgccaatcattattttcaactaagatcgaagaaagcaactccgagattatgtcagaaattatcgttttcttactcttctttgaatttactgcaatgattatttcagccttgcgtcatcacggtcacactagcatcaattttctattgggcttaggtgttactgcgctaattcgcagtctgattacttctcatagtaacatttggagtacgcttgcaacttctgcttcaattttagtactagtaatcgcaatggttattttcaataaaaatctgcgtaatatgtaaaaaaactgtatcactctaggctaatgtcattggagtgatacagttttttgttttactaattaactttgcgccatgaactcattaagttgtttcttagaaaaaacattgccatatttgcatactacgtttcctttcattattgaacgtaattcacacaaccaaaaaagcatcatttattaacaatattgaaaataaataatgctttttagtaatactctgatgctgaatgccagagtcgaactggcgaccttctctttacgagggagatgctctaccaactgagctaattcagcaaactcacaacacatgaattataccaaatgtcgctaattggcgcaacgacctttttctaagcgtaagtgtcaatgtttttgcggtagcctttaaaccattagtctaaccttaatttcttaaatatttatatgacttaaatttctgcttagcttgcttaaataactattgccagctacctgtgcggttaatgcgccatgctggatgcctaaatgaacttcatgacgcttctttaagctgtcacgggccgctgcttttaattcctgttcagtcaatacagttatttctgaatcttcaaactcgctgctaagccaaaattccagctctcgattcttgatgcagcttaagatcctaagcatgccttctgctccagattttgaccatttcttgccttgccccttaacacggtaggtatacttgcggtggttgctctcgcagcagccaatggctttagtcacagtcagttttcgtttcttaaacggcttaatatcgtcccaatgacgatcaatataattccttaggcgccccagataatcatgattgagctcggtattcaattcatcaattagtcggctttctgcagtggttaggatagttttaactttgtcatagctgtatttgtattccaaagcagaaatcagcttgccttgcaggtcaggcgcaaaatatagcctttctttgattttcttatttaggtgaaagacatccaagaaatgctcatgacgcttgcatagccctacaatgtcatcgaagtctgttttggcatatccagcaccgccatcggcgttgctaagaattacagtatcagaaagatcataagtattggccaggtactccttggcttcgttcagcgcatcaagtcggcttaaagaaacaaattccttggcattgattcgctttctgcgtttcttgcttatattgacaatgccttcacagacctgatagcgatgaaattccaaccggcttttagtgcctttgatcaccacgccatcgccttcaagatacaaaactgggacctttttcttagtgcctgcggcatcatatcttgaatctgcttcttggcccgctttaatatttttcccggccatttttaccaaattgcccacctgcatatggctaatattaaagccagacaggcaattgactgctagagcagtattgcgataagtggcaacgctgcttacttctaagatgtttttgactgctaaaatactgtagcgcttgtatttgtcaaagcccattaattcatccaagggataccttgcttgtttgcctgggcagacatatcttcttctgacatacctaacttcgccaaaagccatattgattgagcgctcattcttcttatcaatctgatagccctgtgctttaaccttggtaatcatttcatcatcaactttagctaaagccaaggccatgatttccttaatcaggtttaagaagaaacagattatttttctttcacgcttaatataattatcttcagactttataatatttgcgatttcagttacaattgaattcataaaagaccagcttctaatgtgttttttgttcttaacatcagactactggtctttttgtttgagctcaagtccaaattcaaaggacttgggcttttttaattatttattcaacttaccgtaaaaaattatacacttagtttctaagctagcattcaaaaaagaacattatttccaatctaagcacaatccttgcttgtgcaattcttctggcaattgatcacgatcagtttcatgcagatcaagttttttacctgtaatctgcttagtgaatgaatcaatgcgacggttagaatcacgtaagtcataatatgtcgtaactatatcatcatagtctttaaggtctttcacatcaaagtctttcttataactaccttcaaaacaagtgaacttaagtggtaatcgtggttttaattgtggcttttgatctggcataccgacttgcatccccaacactggaaaagtcaactcaggcaaatcaagcgtcttaagcaaatccaacggatgatcgttaaccgtaccaagtggcacatagcctaagcccatactttctaccgcattagcgacattttgaaaagcaagcagcgtatcttctattgcttggaaaaagatatcagttgtgtgaacacggccgtcgtctttgtcaagttgctttctaatttgttggttacggtacaagtcaacgataaaaataaacaaatcgccttctgcaccaacatatttttggttacataacttttgaattttcttcttttcttcaggatcggtaacgtgcagtaagctagcattttgcataaacatgctggttggagtttgaccaaagacagaatacaaagtttccagttgttctttagtcaaagtttgatccttaaattttctaatagaacggtgatttaattgcgtgtcgattgtttcgttatgtatcattttcatccttcttactaataatcagtaagttcattataacaaataatatggctacttttcttcaaattcaattccgtaatctgcttgctctccgtgctcagctaaatcaagccccattaattcatcttcttttgatactctaattggaataatccttttaagtaataaaacgattatcgtcgtcatgatccctacaaatatgatagtaaataaagttcctaaaatctgagctgtaatcaaatgcaacccgccaccataaagcaagccattttcaatttgcgggttaacaatcttagtcgcaaataatcctgtcaaaatcgaacctacaattcctgaaacgccgtgacagccaaatacatcaagtggatcatctagcttcaattttggcttaatcacatgaatgaagccgtaactggctagtgtacaaataaaaccaatggcaaaggctcctgccacagtaacatagccagctgctggcgtaataccgactaatccacacaaggcacccgtacagaggccaatcatagtagtcttttctttaataaacatatccaaaaacatccaaaccacaaatgacgtaccagttgcaacagttgtagttaaaaacgcttgtgtagctacatcgcttacagttaaggcagaaccaacgttgaagccataccaaccgatccataatatactggttcccattaaaacccatggtaagttataatgcttaacctcaccatttggatcaaaatcaattcttggaccaacaaaaattgataaaaacaaggcggtaataccggcggtaatatgaactacagtcccacctgcaaaatcaagcatccccgttttggctagaattccatctggtgtccaaaccatatgaaccattgggtaataaatcaagatcgaccaaattgcgacaaatgcaagtaaaaatttaaatttcattcttccgaccaccgcaccaacaaacaacgccggcgtaataatcgagaacatcatctgaaacattaaataggtcaaaattgtgatgcctgaatccttggaataaagcgtctttaaatcaaagccgtttaaaaagacacttttactcaaaccaaatattccaccaacatccttacccaaagccaagttataaccaaaagcaataaacaaaacgattgcgacacctgtaatcatgaatactgaaatcatcgtattcacagcattcttctttgaaaccatgccaccatagaaaaaagcaagtccaggtgtcataaagaaaactaaaacactagcgacaaaaacaaatagagtgttcgtttgattaatcatctttttttctcctcaaagtaaaatagttagtcctaatattttaaattggtatatacactatttcattgatgttgcagcatatatgcttaattaaaaaaatattggtttgataaaatttaattctcattatacactcatttttcttcttgtcattaattttctataaaaaataaaggtgcatagacgtatggcttctatgcacctttgcatatatttgcttttaattatttgttttcgttttcaagattgttgattgcagtttcaaccaatgcatatgcttgttgagcttggttcttagcttgaacatattcgttcaagttgtcatcaccattagtaagcacacgtgcaaatgaaatttgttcagccatcaagaagttgaacaatgaatcccacttcttgtcttcaaacttgatttccttagcagaaattctaggcatcatttcacgtgtggtattaaatgccttttccaaaatttgttcatctgcatcggttaattcacgcacattgtatgcttggtggatttggtgaacctttaaaagttcttttaataaagttcttgcttgtgcatcttttgaaactgattggttaatttttaaagccatttttacctactcttttcttttttattaacaattataccaaattgtcttcgaccatttgcttaacgcagcgtttcatttctttaatatcaagaatactgtaggcaaattcttttctaagtagttcctttggcaaatattgatcgtacttgtcgattcctggcacttcgtttggataaaccagatcaagcggatcaaagtctttatcagcttcttcgcctaaaatgcgccagaagtcatgctcatcagcatccatggcaaaatacatgaagtatggtctagatgaattaaagccacggatatttaactttttaccgcacttaattcgaattaatcgctctagtgccaaaaatgcataagtcccagtccatggaaaaagacaccacatattaccgcccagcttgatcaaattattctttggcagaccagctaaagcggcggtgtctctagcttgcgtcaagcgagctttaccattttgcatcaaatatggatacatcatcttttctgcaagtacctttttcattctctgtaaaattttaggttgaatatctccaggtacatctccaaagtaggcaggaattctaccctttacttcatggcaatatacttgatgacgcttgatatccacgtcttcgacaacccatacacgtccagcaatcgcaatcttgtctcctacaggaggtggcttaacgatcgtacctaattcttcgctgccagcgtgaacactgaattcctcgttttcttggaaaactgcgtaaaatttaaagttattcacaactcgttcaccagcaagaccaacgatcagaccaccatcttcagtccactcaatgtgacctgttttaagcaagtgtttgagcaaaacgcgataatcgtcttggctcacgttgtggaaatatgacaaagttaacacccgtgaagcaagttcagctggcgtcatttcaccgcttgaagccagcgtactcatcgtctgatgatagagcaaactatatggcaaacggttaggttcaggtggctccacccatttttcttccgcatacagttgtaccaaggcaatcccttgaagtagcggccacggaatcagttctggcaacatcgctcttgattcagggtgttcttcgcgcatgacaaagtgcatctctggtggattaccgcggcgccctgtccggcccattctttgtaaaaagccagacacagtaaatggcgcgtcaatctgaaaagcagattctagtttgccaatatcaattccaagttccagcgtagctgttgcacaagtcgtcatgtagacatcgtcatctttcattgcggcttctgcagtttcacgcaaggctggagacaaattaccatggtgaataatgaagcggtctggctcatgattataggcacaatatgctctgagctcctgacaaacagcttcacattcttcacgactattggtaaaaacaagacactttttaccacgagtatgctcaaaaatatagccaattcctgggtcagctaattctggtgccttatcagttttcggttcgatttggctcggatcaaagtccctggaacttgcttgtggatttgttttataaaaatgttccatagataaatgccaaatctgtggttcattttgtacccttggtgtaacagtttttctgtttgaaccagcacccaaaaacttgctggcatcttctaaattaccaatagtagccgaaaggcctattctccgtggatttacattagctagttttgataaacgctcaattaaacaaaatgtttgtccaccacgatcacttctaagaaatgaatgaagttcatcaaccacaatatattttagaccaccaaaaagatgcggaatatccatgtgcttattgatcataaagctttcaagcgattccggcgtaatctgcaaaatacctgaaggatgcttgagtaacttgcgcttttgtgtttgagctacatccccatgccagcgccaaactggaatatccacatctgtgcataagtctatcagacgatcgtattggtcgttgatcaaagccttaagtggcgcaatatacagaacttttactgaatcttctggctcattataaatttccgacaagatcgggaaaaaggctgcttcagttttgcctgacgcagtcgaagccgacaatagcacattatgatcggtgttaaaaatttcttcggccgccgcaacctgaattggtcttaaacttttccagccatgttcatagatataatcttgaataaatggcgcataatgtgaaaaaacgtccatagtccatttccttaaatcttaaattcggtataatccttttccacattatccgaaacagcctctgacttggtatagctgaattgatccgagttaagcagatcagtgatctttctatcaggattctgccaaacaatgtcgagcagctcaataaagtcacgaataatttcacgtggcgtgatattggtatccgctccaacacgggcatattcaatcttaataaattgagccaaatcatcatcagtaatcgtgcgctcataaccgtacaaattggcatgcatgtcagctagtttttcagtcaaaaccaacatttcttcagcggttaatggttcaagcttaattactggcgcatacatatcacgtgctccttcttgagcgaatttgcctgaagcaagtcggctgcgtaaagcttcgtatgaataaactccgcgacgacggtctttaactgcttgtggcgtaccacacataataatgcctaagtaccttgctttgccctgcaaggtatcgttgtacatggtcaaaatcttttcatagttgtactggcggctaattgtattcggaattttataaatattaaccaattcatcaatcataatcattaaaccagcatagcccgcttgtctaaagaaagtcgcaaataactttaaatattcataccagtcactatcaccaataatgatatcaacgcctaattcctttttagcctcagtcttatggctatattctcctctgaaccacttgactactttagccttagtctcatcatcaccactcatataagcgtgatagtacatgttcagcaatttagcaaaatcaaaaccatgaactaattcgtttaatgaagaaatgacgccatagattttttggtcaactgcttgctcaaatttaggatcatcattatttaagcctgtttcttgcgaaacttgcatctgcactgaattaatccagcgatctagaatcaaagtcaaggcaccaccttcaggcctagtcttagttgataagttctgaattaattcacggtatgttgctaaaccctgtccttttgatccttgcagccgacgttcaggtgataaatcaccatctacaacaacaaaatttttatccatcacatagttacggatcgtttgaagtaaaaaactttttcctgagccataacgacccacgataaaacgaaagcttgctccgccttcttgaataacatccacatcgtgtaatagggcctcaatctcggcctttctccccacggtaatataaggtaaccctattcttggcactaccccaccctttaatgaattaaggacagtttgcgcaattctttttggtactcttcttttttgtggcatgatttcatcccttcaaaaacatatcttttaagtcatctacataatcggtaattacttgtggttggtcctgttcgttattttctaaaaccacatcaccgaattcatcaaataatttttcattaatattatccatcaaaattgatgccattaaatggtgctgcttcaaataggtctgccaaggctgctgcatcagcaatgcagttaagaaaaacatttcattttcatctaagccataatcattatcaactttgacagtttcatctgcttgtttttctacttcttcttgtgcttctgcctgctctagctgcttttcctcatccgttaacaaactatcacgcgtcttcgaagcattggcccgaatttgatccaaatcggaaaaatcaatcttaatctgatcaatctgcgcctttttttcttgaatgcgatattcagcaatccccgcgttaattgccttaagtacagcttgatcaataaatcgcggcttaatcgaccgacctagtttaaattctgttcgcgccactctatctaattcatggagaaaattatttaaattaacccgctgacggttgatttgttgatcacaatgaatttgccattttccttggtaaaaatgatactttcttactgcatcaatctgatggtcagctacttgttgttttcgcagataaaaaacactgcctacaaagattggcttttcaattatatcaggcttgcccacaaacgcactgtaatacgcaatgccgtattttttagcatccagcagctccagccacacgtaacgcaacagttgaacaaataacttttcattcttattaataactttagatgaattccaataagtcgttttctttgcaaagactgctgctaactcttgcgcagtaaatttttctggatggtgtaaaacctcataatcatgatcacgcttaatctcagatgcaaagcgctgcttaataatcttttcgtctaaatcataataaagaacataatctttgagccagtcttgtaaatatacatcaatactaatgtcaaattgtcgcacatatttttcttcaaattctaacagcttttcatatccatcttgtgcgtcatcaacaccaatattgttcagtaattcataaatataaacaaaggcataggatgtactcgttttttcaaaaacatgctggcgaatcttgctgcgccaagtaaagtaacttctaagctgcccagtattcatatcatgataagttggataaaaacgcttaaaggcaaaaaattcaggataatcatcatcatagtcggccatcatcctagcctgttgataaaaattcttagctcggccacgactgggcaaaatactgtagtcataaacttctagcatctttctaattctatctggaaccagactattgttatgcttcttgcgaagattttcacttggtttaattgcttgggcttgatagcggtcatctactttatctggtgcaatataaaaatattgattctgggcgatatttacttcatcaccattcatcgccagtttaaaagcaaaatcaagtgcttttttgagtgaatcttcactaactttttctaatattgtcccaacccaatctgccgccttgatcttcattggatcagtgaagccaggcaaatctcttattagtgcagccattgcaccacatttcaggtccaatatactctgaccttgcccacgtgataatatcgcaaaataaccactatcaactggtgacattaaaacgtaaacgctagtggaacctggtacagcaggcttaaatttcaaaccatatttggcatagacatatttgaagagttgatttgaatccattttgtctccttttttcgcacgtacgttcattatatcatcgatttattttttaccaaagtcacgcatgtcagctcctcatgtatatttttaagtttcataaagtttatatttttatatttgtgtggttattaacaaacaattatgttactatagtttatgtaagttattgaaagcgtttttataaaagcttcctagagaggacaaaaacttaatatgagtacaaaagaatgttattctcaagatgaattaagaaaagataatccaatgtttagccgcactcgtgccactattgaaagtgcattttacggcaacaatgtccacgaagtaaccagtgttgcagaagcttataacttagctaagaagcaatcaggcgttattgttactgacttgccaatcttacacactaaggaattaggtttgccacatggcgcaacccaattggtttacaaccacggcaagattttaggtagaactgctagcgcccgtcactttgttgccaatcctaatgaagatgctgaagcattggacggcaacctacgtgaagatatttacaagggtcatgaacaaaagtacttaaaggctactgttttagtaggtcttgacccatcattcactgttaaggctcacattatgatgccagaagatcaagccttcaaccttctttcatacatcctcaacttccacttcttcgacgatgaagctgaaaaattatacgaaaagtcaaagttctacgatgaaccagacatttacttctacttcgatccaaatgttcaagacgaagattaccctaagggcttaggcgtatttgacgctccacataactgtgctgctgtcttcaaccttcgctacttcggtgaacttaagaagggtactttaaccttagcttgggctattgctcaccgtcacggctacactgcatgtcacggtggtgaaaagtcattccactttgacgataaggacgacaagacctttgccttctacggcttatcaggttcaggtaaatcaactttgactcatgaaatgtacgatggcaagtatgacattactgttttgcacgatgatgctttcattatttcacgtgaagatggttcttcagtagccttagagccttcatactttgacaagactcacgactacccagcaggccaccacgagactaagtactacaccactattatgaactgtgatgtaaccttagacaaagacggcaagaaagttatcgtaaccgaagacttacgtaacaacaacggtcgtgttatcaagacccgctacactagtcctcaccgtgtagactttgaaaagtcaccaattactgcattgttctggattatgaaggacggttcattacctccaatcatcaagatcgatgacccagtattggcaactactatgggttgtactttagcaaccaagcgtacttcggctgaaaacttacctaagggctttgacatgaatactttggttattgaaccattcgcagacccattcagagcttacccagtttcaggtgactacagagacttcaaggaattgttcactaagcgtggtgctagttgctacagcttgaacaccgacgcatttatgggtaaagacattcctaaggaagttactaagaagttaattgaagacttagctaacggcaatatcaaagacagtgacttcaagccattcggtaacttcaagggtgtatcatacttacctattgatggttatgaagttcaccttgaggacccagaataccaaaagaccttagctaagagaatgcaagatcgtttgaactggctcaacaagtacgatgaagaacacccagaaactccaattcaagatgaagctaagaagaccttggaagctatcatcaaggaattgagctaatattaaggaaataaattagtgtctcattcaattaaaatttaatttcttaatgacgaaaagacgagagttgaaattcagctcccgtcttttttattgctcaatgtaattttgcttctgtagtttggcatctatcagtttataaacttgcactttattctcttgtgcaagttgtggattatagttatgtgctatttcaatgacaatagccggcaattggtagattatcttatgaatggcatcactatttttagggtctaaacttgaacaaatctcatcaagcaaatatatcttcttagaacgaattagacctctaactaaagcaagtcgttgtgcctgaccacctgataaattgttcgcgtcatctgaaattaatttatctaaaaaatcattgccaaactcatgaatcagtcccatcttttttgcttcatgaagcattagatcatcaggtatgttttgcagaagtgatagattctccctcactgtaccttggaataaccagattctttgcgagatcttgatgaaatcggcaggattaatttgatgaccagcaaaggtgatttcaccgttatacttcagattattagcaatacaattaattaatgtacttttcccaatgcctgaagccccagtaacaatgatcttgtcatgatcacgcaaagttaaatttataccatctaaaattttcttatcaccatatgaaaaagacaaatcttttattttcaaaatagcttgagagtcatgattatcttgtttaacactttcactttcttcaaaattatagctttttatttttctaattgcatcggtgctatgaatttgagtctgatacaaagcaattgttcttagatatcccacaaccctatcagctgacaaacttaaagttataatggccgctaccgttacgttaaaccagcctctctgcataaaaagcaagccaataaaaattggtagcaatagtgtaactaaagagattaaccatgcaatgaattgtacctggaattgacaattattcatcttacgatatttgtcttcctcattaaccaagattcgatcaaatcgtttaaagaaaagatgtctgacaccaaaattcagtatttctaagcgtccttcaaatatatccttcattgcctgaatcaactgtgagttagatttattccatttttcggttttctcattcatcctcttcttgccaatatagcttggaatcagggttagcgctgaaagaagcaaataaataattcccaaaatcagattagtttctacaacaactattgccgatgcaaccacattaaatacaaactgaactatgtcagttatcccaaagaaatatttttgttcaatttctttagcagtaccactaatcgaattgattacatctgctcctcttgcttgcttcatgtctgaattagcaaatttagaataaaaatattcttgctttaaagcaatatttaatagcatcacaattctattttgaaccaaataaaacaagagcatggctatgtagactatcagatatgcgccaaaggctaagccaataaatttataaacgtggtcaatgttactaaaattgatattagttaattgtccaaacagtacagcatttaataccccttcaaatgctgaaatggccgataaaaccagaaaaactatttgtaaatatattggaacatgttttactacccatttaaaatttatttgttgtgtgttcattgtttaatacccacatatttctcataatcaacaagccaatcttcatcatttttataagaatgattcatacactttttaaacccaattgctttaaatcatcttcatctttagtttctaacaattgtcgctcttctagagacaagtgatacttattcactaaggcatcaatattctccaaagaaatatttttaccatcagaaagatcctttcttcataccttcagacattactatacctcctattttctctcgttaagtaatgcataattttcaacttgcaatttactgtgtatgggattgatatcaatgcttcccataattccccaaatgcttataataataacagtaagtattctcttattttttaatttcaaagccaggaattcattatgtacggtcaaaaatttaaagcacttcgtcttcaacaacatatttcactagagcaagctgctaacagagttatctctccatcgactttatccagatgggagaataataagattgatattcgcttcaatttagttattaagcttttagacaatattcatataaacctaaaagagtttactaattactgcaaaattaatcatagtaatccctttgttgcgaaagtggctatgtactatgaagccaacgatgatcgtcatattttgcaattaatacaaagcaagaaaaaagaataccaaaattcacataatcaatttgatttacttctactagctatcgcatgtaattgttattacgatctaactgataacaatgttttcccagtgagctatcaaaagaaattattctacattttatctaacattgaatattggacagagatgtacatcaatgtttttggtaacactgtttttctctatgacagcaaggaactatatagtatttcaatcagaattcttaaaaatttaaattctaatacatttaatgattttcaagaatattattatgctttatcctctgtcatcaacgccctaaccgctctaattatcaaaaatcccaaattagcatcacagcttttaactaaaatagagaaagtttcaattcctaaaccaatctcttacttaaaaattagaactaatgtcctcaagtatcttttagattaccgtttaggcaaaacagatgaaaagcttatctcaattaagctagaaaatttaaagtggttaggattaacagatattgcaaaagacttaactttcttctttaaccgtataaaaaatgatcgttcacctctttcctaattcatttgcctattatattaccctcatttttatctaattgatttttctttgcaaatatgcaaaattatttttagcaagaataaaaaagcctattaaatctaggtgtttacaaaccctgatttaataggtcttttatgcgtcttttttattgctcaatgtaattttgcgccttagttaaaatatccatcttctcatgttcagttaaatacttttgtgcttctgccaaattgacccatttactagctaaaatttcttctttttgaatgttaacctcttgtcctgcaacatagctagcaacaaaataaactactgtcttagctttatcaacagtcaactgatattctgttttttctctaaaagtaaagtcaaaattcggctttaaaccaacttcttcaaaaacttctcttctagcagcttcctcagctgtctcattattttctaaatggccttttggaaagccccaattatgatttacgacgctctgcacgatcaaatatttcagctcgccgcttctacgttctctgtaaataactgcacctgcagaatgttccatcttcatttttgtcacccaacctttatattgcataattattaaatatttattaacgtatgtcaagcaattgtaatcaaaaaaatgaccagatctttgacgatctagtcactttattcgcagacgaaattattaagttctattggtagaatattttaagttacttcttcaagttcttttcgcagtattccttgaccttgtcatcatcggccttaagaatccattcaactgcagcctcagtcttcatggtgtctcgaccatttacttccatttcgtggtcccaaatagcgtcacgaataggcatttcattacccttagcccagtcaaaaacttgatccatatttctatcaattaatgcagtttcttcaatttcttttgcatctgccataattaaaagcttcctttctgataacgactttattgtagttctattagctacaactgttaacaaaaagggacttttttatttaaattctaatttttgccattaactgcttcatcagccttattcactacactaaccgcattaagtgaacgaggataaccaatgaatggtacgttttgttcaatgaccttcatcaagaattccttgtcattgcctaatttgatatttgcttgagcatgggccatcaattgaggttcacagccaccttgagctgcaatataacagaaggtaatcatttcacggtcattgtcatccaagccttttctagtgtagtaatcgccaaagcaattatcaactaaccacttattgattgttcccttcttggcaaaacccttcatttgtggaccaaacaagcgcatttgagtttcctcacccttttcaaggcgattgtctagtgtagtagttgcttgacccgcaagaggtaattcaacgccgcgcttagttaaaacatcattagtaatcttgaaaaatggggaaactctacccaaacctaaataatcaaccgcttgatataaacttccttagcttcaactgggttaacaccattgtctagtacgactggaagcattatttcatattcttccttgccttgcatccccaacaaataagctaaagttgacaacatcttagtccggtcgggcaaatcaacgtctttttgcacttcgtcaaaagcaaaatgattaattctttccaaagcttctggatcagtagccttcaataagttggcatgtactctttatgcatcttctttaattgacataataaattcctttctaaacgcttatctctactatttatttaagtacgattgagtctaaaagaaaaatatctattttttattctgcaatataacttattcttatcaaaaaaatatcctaaaggctttttgccttcaggatatttctattaggttatttaattagtttttcttgtctgcttcagcatcatggtatgacttaacgatttcatcaactaattctggatcatctttcaaatcagtagtttctacaatgacatccttcaagtcttcatctttaagcatttgcatcaacttaacgctttccttgtcgttaggttcatcaaagtgataaattctaccaacagtttccatcaatgcactgtagtccaaacctctgtccttcaattcacggattggacggataaatctttcattgtagcctaacttacggattggagttctaccaacacgagcaatatcatctgaaatatatgggttttggaatctgctcaaaatcttgttgtggtattcttccaaactttcttcggtgaattccttgttccacttgtggtaaagaagtgaacgggtttcactcaagacacgcttaacttgctttaaaacaaatggatccttaatagcatccccaatagtgtcatagccaaggctcttgccagtataagcaacagttgcgtgtcccgtgttaactgagaataactttctttcgatgtaaggttcaaggtctggtgcatagtcaacgccctttaacttgatatccttgttcttcatttggctttcgtcaataacccattccttgaagtcctcaactgagacaaacaatggatcgtcattatgttggataggaacaattctgtctacagctgcgttagggaagccaatgtacttgtctagttcaggcttaacgtcatcgtccaagtgcttataaacttcttcttttaagtgttctgaaccgccaatcatgttttcacaagcaatcacatcaagtggagtagtgttgcctgattgaattctagcagttaatcctttggcaattaatggagcaatgattgccaaaatctttggaccaatggcggtagttatcatatcggttgatttaattgcttcaactaccttgtctggatccttagcattgttaattccatcaacatttgaaacatgaattctcttcttaccaggtgcggctaattcaatgtcatattcaccacgcttgtttaattcatcaataatagtttcattaacatcaacgaagtcaatgccaaaaccattatctgctaaagtttcaccaataaatccacgaccaatattacctgcgccaaaatgtactgctctcatgtttaatctcctacgttctttaataaatcaataatttcttctggtgtttgtgcgtctgcaagctttgcaacgttggaaacatcactacagaaaatagcaatctgtgacaaaatatttaagtgttcattgttcaaaccagcaatcccaaagacaacggttaccaattgctcggtatcatccttagggtcactaaaatcaacgcccattggaatttggactaccgaaattccagtttttttaatgtgcttcttaccttcgtcagttccgtgagggatggcgatgaaattacccatataagtcgacacatcttcattacgggcaagcattgaatcaatatactctggttcgacacagccgccatcaactaataattgaccggccattctaattgcttgatcccgcgttggtacgtcttgattaagtttgatcatttttggatctaattgtaatgccatttagctcatccctttctaattcaacttttgaatagcttcgccaagctttttatctttaagtaaatcatcaacaactagggtttgaatatcactgtatctgacagccaagttcttattagcagctggagtaacaattactaagtgacttggatcatcagtcaattcgttgattcttactgccttaacaggagtagtcttaccagccttcttaattgcgtcattgaataaactagttgccatagtagcggtacctaagtgttgatcgtgacggatgaagtccacttctttaactttactgaagtcgattccttcaagtgaaccaaccttcttaactggtttttcagcctttggcttatcttctacttgagttaaagctttgaagctagctacgattgtgtcatatttcggactactcaagaagttgccaaccgccacgtgcattgcatgtggagtcttttgtaaagcgcggtcagctaattcttcttgcgtgatgatcaacaaaccatcttcatctttcaagtttctaacagcggtattggttactgaaaccttaatgccagccttcttgaatttatcacgcaaaagtgaagcacccatagcagatgaacccatacctgcgtcacaagcaaagataattttcttaacattggcatatgacttaactgattcatgtgcatcttcagcttccggcattgattgacctttagattgggccttcatggcttgcatttgggcttgttttgcttctaactcatcaccagtactcttgtcgtttttaagaataattgcggcaataatgaatgaaacaactgcggcgccaagaacaccaacaatattaccgaaataagcatcctttgcggaaacaagcaagatagctaaaattgaaccaggtgaagcagctgcttttaatccaccaccaagagtagtgaataagaaagtaccagtaacaccaccaccaatagcggctaaaatcaatgatggtttcattaatacatatgggaagtaaatttcatgaaccccaccaaagaattcaatgatggcagcaccaggagctgagctctttgacttacccttgccaaataaagtaaaggcaagcaagattccaagtcctggacctgggtttgattccattaagaacaaaactgacttaccaacttgtgcagcttgttggatacctaatggaactaagatcccgttaccaatagcgttgttcaagaacaaaactttggcaggttcaataatgatgttggctaatggtagtaagtgaactctaataattgcatttactcctgcactagcccattgactgccaacttccataatcggtccaatgataaagaaggcgaaaatcgcagcgatcatgcctagaataccaagtgaaaagttattgtagatcatttcaaaaccagatttaatcttgtcctggaatacttgatctagtttcttcaataaccatgcactaagcggacccataatcatggcacctaagaacattggttgatcagtaccaacaattacacctaatgtaccgattgcaccagcaatggcaccacgttcttcataaaccatgcgaccacctgtataaccaattaacagtggcaacaggtaatgaagcattggttgaactaagttattaatttctttgttagggaaccaaccgtgtggatacataaagaatgcagcggtaagtccccaagcgataatggcaccgatattcggcatgatcataccggataaagctgtaccaaatttttgaaccttcactttaacagaagatttactttttgcttgagccattttcttcttcctctctcatcaacttacatttttattctaagtcaatcagtaagcgcttacaatgaaatgaaaatagaactctggcacacttttgtgccagagtctgagtttacctattctattaagcttttgaactattggttacctagtaaccgatctttgaggtcttgtaaaaaaagtgccgcaattgcttctttaatttctttttgactgccatttgtaaataaatctaagttttgactagacatgataatcatgctggaaatagtactcattacccgctgttcgggtgcagtaagattgtctggtgccagcatcaaaagaactcttttgacttgaatggtatcatgatccattgattggagcgagatttcattatctaagtcaaacatggtaaatgaacagcgtgtaatttctggactacgtgtgtgtagcaatgcgatatggctgttagggatgccaactggtgccattcgtacacgtttgagaagatttttggcaacgggcatttgcttacgaattagtgttgaatccgaatgggctaaacattcctgaattactgcaattaagtcttgcgaattgtattccagttgttgaatcttgattccgttgactagctccgagcaaaataatgtactaatcgatagcttagcaagttgttcgactgaatggggatgtttttcttcaactacctgtttagctggaactggttgaggatatttttgttcataatcttttaagtaagcgcggatttttattaattcatcatcaagcagtaatggactaacaagtaaataatctcttgagaagcccttcaatctcaaggttgaaaaaataagattgtaatttgacaagtctatttgatttaaggcagaaacacggctggttttgacttctttgatttcagaaaattctctttttagtttggcacctaagattgccgacgttccaatgccattttcacaaattactagggccgataaattacgctgctgattgcgactcgtgtattcattggcaaaataaagcaagatcaactgcaactctgacgctgtcaaataattttctggaaacgctaaatgccaatatttttgaatagctagatataaatcaggaaacttttgactaaggcctgccagaatttcaataggtgtatctggtaaaagagctactttatgttgtactaaaccaataacgtgtttcgtcactttagtcataaaactatgatctttttgaaaatcccaatgcatttcttcagaaacgtgttgaacgaattcttttactttgactgagattgctaattcgcgctcattataagtcaagtaagtgttgtgataatcacatgataataacttattagctaagtatgagacatcattttggtcaacctcaacttgccgcttttgcgcaaacaaggccataaaacggtaaacataaccctgatatttaagtgaatcagcactggggtggataaaatctagcttgcatcccgccagagttctttttatcgttaccgcaaaagttaaaattaactcaatcagcttttggtcactgtctagcttaattttaccaaacacgctttttttaagacaatcagcaacctctactagcaaagccttatcaatcattgtcaaaaacatgtctttgcttgtcgtttcattatgcagatacttaaaaaagttatattcattgatctgattgagcataatatcaactaaaacctgacgccgtattttttcaggcgcctgaattaacagtcccacaccctttttgcggatcaagtcaatatgatatcgttttagcgacctttcaaccgtattcaaatcactttgaatcgttgcttcactgacattcaggtcaagcgcaaattgaataattttacatggctccgtacttaaaagcaacttagctgcaattatcttctctcttttagctaccgaaattacattttgactgtgagattgttgcacagattgcttaatttcttgtaattgctttgaatcgccagataaaaaatattttcctttttgattttcaattttaaagtcgttcttctttaaatcgccaaattcgcgataaaccgtccggcggctgatctttagactctcttcaatttgtttgatacttaccccactcggatttcccaacaaaatttgaagaatgtgcttttgccgttgtgttaaaaacatcccatcatcctcgcttacgtttaagtttattatacttgaacgcaaaaaaagaagacagatctcaaatctgccttcttgaggatatttatttacatattaattattcaacagtaacactcttagcaaggttacgtggcttgtcaacatccaaacccttatcctttgaagcgtagtaggcaagaagttgagttggaactactgtcaaaagtgctgacatgtagtaattaatttctggcaacacgatcgtgtcatcactatttgcgaattccttgcctacaatagtaattactgaagcaccacgtgaagcaacttcttgaatattaccacgagtaagatctgcagtaactggatcgttaatcaaggcaataactggagtgccatcttcgatcaaggaaatggtaccgtgcttaagttcagctgcagcaaagccttcagtttgaatgtatgaaacttccttcaacttcaaagcaccttcaagtgcaacagcgtgatcaataccacgaccaatgtagaatgcgtttcttgattttacaatatattgatcagctaattccttaagcttttctttaccgtcaacaatttgttggataccttcagcagcgatggctaaatcatgttgtaagtcccaatccttagcatcttgattaccaagtttttcaccaagtgccttagctaaaatagcttgtaaggcaacttgtgcagtgtaagccttagttgaagcaacggcaatttcaggacctgcacctaaaagcattgtgtagttagcttcacgtgataaagttgagccttcaacgttagtcatagtcaaacttggaataccacgcttgttagcttccttcaataccacgcgtgagtcagcagtttcacctgattgagtcaagaaaataaagaatgggtgcttgctcatcattgggaagtggtaaccagcttctgaagcgtaaccaacttcggtaggaataccagtgtagtgttcaaaaatagttttaccaactaaacctgcatgataactagtacctgcagcaaagatataaaggcgatcagccttagaaatagcatcaataatatcttgatctacctttggttcaccattttcgtcaaggtagttttgtgacatgtgacgcattacgcctggttgttcatcgatttcttttaacatgtagaattcgtaagtaccctttgaagctgcgttagggtcgatgttcaaaacgtgaggttcacggtctacctttttgccatcaacagtttcaatagtgtaagaatccttggtaatgtcaccaacatcaccatcttgcaagtcaacaaaagtcttagtttggtcaagaacagaaatagcatctgaagcaatgatgttaaagccatcaccgattcccagcatcattggtgacttgttcttagcaataaatacgtggtctggttctgtgttgtcaacaagcaagaaagcatatgaacccttaaccaacttcaaagcttccttaaatgctgaaaaagcgtctaagttcttatcacgtgcaattttaccgatcaattgaacaactacttcagtatcagtatctgagtggaacttaaccccttgcaagtacttttcctttaattctgtgtagttttcaatcacaccattgtgaactagatagaaacgcttggtttcatcaaaatgagggtgagcgttatctacagttggcttaccgtgggttgcccaacgagtatgaccaataccaactaaaccttgttcatctggagtcaacttttccttcaagttagaaatacgaccaacagccttagttaagtattcgttaccatttaaatcatttaagtaaatgccagctgaatcgtaaccacgatattccaagttggttaatccatttaaaataatatctcttgcaggcttacctacaactccgacaattccacacataattttctcctttggtctagtttgctttgaagtaatggactagcttatttttattgttacagtaggtataatagtctttttgcaaaaatcggtcaagtacaaatattcaaaattggtattataattttaagcataaaaaatggctaccagaatttgctccgatagccatttttacttaagtcaattttaacttttattacttgtttttgatacccttaccttcatagcagtctctcatcaattgagaaatttgactaattaatggagctgatgggttagtaacagtgttttggtcgccataagcttcaacagctaattggtccaccttcttgtcaaactcagccttatcaacgccataatccttgaaggccatcttaataccaactgattcagccaaatcaataattttctgaactaatttttcaattaattcagcatcacttgaaccagttaagccgattgctctagcaatttcagcatagtcgctttcagcacggtaaactgagtaatgtggccacatagcaagtttttctggacgcttagcattaaagcgaatgacttgtggcaaagcaattgcgtcactgacgccacttggaatatcaaaagttgaacctacggtatgagcaattgagtgttccaagccaaggaaggcatttgaataagccattccagcaatcgtagctgcatcatgcattctctttctagcatcaagatcgccatcgtaagacttcttcaagttagcgaaaattgctttaatagcttcaagtgaccaaccacgagtgaagtcagttgccatggttgaaacataactttcaattgcgtgacctaatgcttcaaaacctgaccaagcaattaaacgtttgggcagcgtttgcacaaattgatcatcaacaattgaaacatcaggtgttaaagcatagtcacataaggtatgtttaattccagttttggcatcggaaataatagcaattggggaaacttctgaaccggtacctgaagtagttggaatacatacaagttggacaccattaatctttgggaaacggactactctttttctaatgtctaagaatttttggtaagcctcttcaaaactcatttctgggttttcgtagaataagcgcattgctttagcagcgtccattactgaaccaccaccgatagcaattacaacgtctggcttgaagatgttcattctgtgaacaccatccttgatcacatcagtattaggatcaagagttacagccttaaagacttcatattctttttgacctaaacgcttagaaatgatatcagtaacttcatcagcaaagccttggtcagctacaccttcatcagttacgatgaagaaacggttaacgtttggcatgtgacgaaggtagttagcagcgttatgttcgaagtaagtctttgatggtacctttacccattgcatgttatcacggcgtctagccactgttttgatgtttaacaagtccttagcaccaatgttgtgtgagaaggtattggcaccatatgaaccagtacccaaggtaagtgatggcaacatattgttgtaaaggtcaccgataccaccgagtgcagctggtgagttgactaagatacggcaagcatccatcttcatggcaaattcatcaataatcttcttgtcatttgagtgaagaccagcggtgtgacctcgaccaccatagttcaataaatcggtacaaatcttaaatgcatcgtcatggttcttagcacggtacaaagtgaagactggtgaaagcttttcagctgatagtgggaagtttctacctacgcctttatattcagcgataattactttagttgtctttggcacatccacaccacaaagcttggcaatttcataagctgacttaccagctactggaccagcaaccgtaccacgacgaggatcaataaagtgttcctcaaacttcttaatttctcctttgtttaagaagtagcagttccacttcttaaattcttctttaactttgtcataaatttcagtatcaacgacaactgaattttcagaagcacaaaccataccgttatcaaagttctttgataaaacaatgtcataaactgcacggtcaatattagcagtcttttcaatgtaagaaggaccattaccaggaccaacaccaatagctggcttgcctgatgaataagcagctttaaccatacctggaccaccagttgccaaaatagtttgaacacctgggttagtcatcaaatcggtcgttgcatcaaggcttggttcttcaatccattgaacggcatccgcaggagcacctgcagcaacagcagccgcacgaatgattttaccagtttctacacaacatttttgagcctgtgggtggaaaccaaagataatggtatttctcgtcttcaaagcaagcattgccttgaaaataacagttgaagttgggttagttactggagtaacacctgcataacacctttaggttcagcaatcttagtcaaacctaattccttgtcttcttcaattacgccgacggtcttttcgtgacgcaaactgttccagatattttctgaagcatacatattcttggtagttttatcttcaactacaccacgtttagtttcttcaacagccattttagctagtgggtaagcattttgttcacctgcagtagcaactgcttcacagatcttatcaacttgttcttgtgtgaagttagccatttgatctaaagcgacatgtgatttctttactaagttatcgaccatgtcgtagatttgctttttcttttcgtcctctgtaagagtctctttttgttgtgtcttagccattgtattattacctctaagatctactaattcttgtgaactaatttacaatgtcaactatagcacaataactttatttgtaaatgcatgaatttatgaaaatagtgaattaacaaagattcacatttcctcataatttcgctctaatgcaaatgaaagctattccttaattatttgtttgtgaattaacaaacttatttttaaaaaacagatttttgatatttttttaaatctaactatagagtctggtcatactaattgataatgataaaatattaagtatatgtgaaaagattgagaacattggggggcttatatgagtgagaaaaaaacacagaccgcttctggttataaacgaaccctaagcaatgcacacattcagttaattgctttaggtggaacaattgggaccggcctttttctgggggttggagacagtattcaccgcgccggtcctagcgttatcctgatatatattattgtcggtatcttcctcttcctgctaatgcgggcactgggagaactaattatgtccgacttgaacaagcacacatatattgattttattgaacaatatttgggtaaaaatattggctttatcacaggctatttgtattggttaagttggattaccttgggtatggccgaaaccacggccctaggaatttacttcaagtattggtttccaacactgaaaccttggattccaggaattattaccattgtgatcttgctgttaatcaatttaatttcagctcgtgtctttggcaacttggaattcagttttgccattatcaaaattgtcacgattattgccttcgtcatcttgatcctttacttactagtaactggtggcaaaaccagctttggtcctgttagctttgctaaccttgacgatcatggcggcttcttcgcccgtggcagtaaaggattcttacaaggatttcaaatggtaatcttcagctttattggagttgaattaattggtttaaccgcggctgaagcacaaaagccagagacaacgttgaagcgagcaatcaatcaattaccaattcgaattattttgttctatgtcatggctattttaggaattttgttagtaattccatggtccaaagttgctactaacgctagtccatttgttgaggccttaggtgctactggtattaaaaatgctagttctattattaattttgtagttatttcagccgccgtctcatcaactaacagttttttgtatagtgctggtcgattacttttctctgttacttttgatggtaaaggaaaatggaacaaaacttttggacatttatcaagaaggcagcttccacaaaatgcattgattttatccgcattattgatgggatgtgcaccactaatcaccttggttattggcgatcaggcctttaattttatctcatcaacttcaactagtatgtttttaatcatctggagtttgatgattttaactcacatggcttacaggagaaaaacaccagctaatcagctaaacgattttcaaatgccaggttacccttatatcgattatgtaatcttgtcattcttcgttttaatgattatcctgctattgattttaccaagctaccgagtaccaatggtcgctgcaattgcaatctttattgttttatacatcatttccaaaatttggagtaatgaaaaagctgtttaaagcaaaaagtcgagttttttagctcgaccttttattttgcaatttttttaattattttagcaggatttccggcaactaccgtattagctggcacatctttggttacaacggcattagccgctacaacggcgtttttacctaccgtaacgccaggcaatatcgttgctttagcgccaatccaggcgttttgtttgataacaactggctttaattccagttcttttctatgctgtggatccagcttgtgattaactgaaatcaggtaggctccaggcccaatcaacacatcgttctcaattgtaatcccgcctaagtcgaccatcatcacattggcattaataaacacgcgctcgcctaatttgatgttgtgcccataatcagaataaaatggtaaccgaatctctatactagcagctattttttgaccaattatttcactaaccaattgtctaacttcacagctacaatgccgttgtgtatttaaattctgcaataatcgctgattctgttgggctagttttcgacgtaaatcgtgatcttctgtttccattattaccactcctttttcttgctctacttcagtttaaagggtaagcttatcaatgtgcaaagcttataaggtatgaagtataataacaattgtttataggtgatttaaatggaattacgtgttttaaattattttgtcgctacagcgcaagaattaaatatgacgcgagctgcacaaaaactattagtctcacaacctgctttatcgcgtcagatagcagatttagaggatgaattaggcgttaagttattcaaccgccagccgcggcacttaaccttaactcctgcaggacagtatttatatgaacaagcaaaagaaattcttactttagcttccaaaaccaagagtaacctacaatctagtgctgtcatcagtggtgacctaactattgctgccggcgaaagttttgccatgcaacgtctaatgaatatcgtcagcaacattattcgggattatcctacagttaaaattcatattctaagtggcgattatgaatttgcagaaaggcgtttaaacacgggtgcagttgattttgccgtaatcattggtaatctacctttagataattatgcttctctgcagctccctgagaaggatacatggggcgttttaatgactaaggatgatcctctagcaaaaaagagtgctattacagctgaagatttagttggacgaaacgtcttaaattcacaacaagctgaaaatcgaaagtactttgattcatggttcggtaattataaagagcaaattaatatcatcggtactgttaatttgaatttcaacggtacacttttagttaaaaataaagcagctattatgctcacactcgataagctagccaatatatcagatgaatccaatctaacttttagaccaattactccaatgttaaaacagccggtcacagtaatttggaagcgagaaaccaatttatcacctgtagctgatttattcctaaattgtttacgagcatcaattgatgacgattaacaaaaataacctagaccgaattgatctaggttattttttactttatttctttttacgactaaaacgttgcttcaatcgttgccataagcttaatgccctgcgcatatgatcagctggtacatattttcttattgctcgcaatacctttttgggatcacgtgccgcaaaaataaatttaccatttgacttagttctgatttcaaaacgcggaatataacgtccaccaaagcggatatctgcaaccacataagttacttcattccaaggaatctgaacataatcttcaacgtttcgttcgttataaaattcaaaagctctatcgccgatcatgattttgccgtatgatgcaattcctctaaaccaggttgcatcaacagtgagatcgacttttgtattaattgacttagccatttattaaagaatgccccatacgtggaagagaacaccgacaacgaagataccgatgataatccagattggtgaaactttcttcttcaataaccacatacagaagaaagttaagagcaaaccagctaaaccaggaattaattggttcaagttgtcttgtaaagtagtaactttagtactgcttaaagctttaccgttacccatatcccattgttgaagagcggattggatacctttagcacctgatggaagcttgtcccattcgatgtaaccacccttttgaataggagtttgagaaacaattggagtgaacttgatgtttacccaacgttcaattaaggcacccaagacgaacatacccatcattgaagcaccacgggtaaccttttgaagcataccacctgacatatcactggtgatagctgaaccagccttgtaaccaaattcttgtgtgtaccataagaatgcgattctgataatattccagataacgaagaacaagataggacccattacgttacctgcaatggccattgatgcacctaatgcaccaacaattggacgaacagtgtaccagaatacagggtcaccaacaccggccaaaggtcccatcataccaaccttaacaccttggatagcgtcatcagtaacttctgcaccgttagccttatcttcttccaaagccaaggtaacaccaagaacaggtgatgctaagtatgggtgagtgttaaagaatactaagtgtctttgtaaggcagcagataaatctttcttgtttgggtataactttctcaatgctggaatcattgaataagcgtaaccaccgttttgcattctttcatagttccatgaaccctgaaggaattgtgagtgccacataacgttaaaacggtcgcgcttggttaatttagttttcttatcagccattatataaatcctcctctatgcgttcattttaatagtcatcaatgatatcgccgagtggatcgccagtgccggcatcgccagaattattgtttccaccgttgccacccttagcttcaagagctaagtacatcaaagccattgaaaggccaatagcaccaagggcgatcaaagttaagtccttgatagcagcaagggcaaaaccaattgcgaagaatggccatacttccttacttgccatcatgttaataaccatagcgtaacctacggctacaaccatcgcaccaccgatagtcataccttcgtttaaccattgtggcatcattgcaagccaacttctaacagtacctgaagggattgctaaaagaagtgcagctgggatagcaattctcaaaccttgtaaacatacggcaatccattgccataagttgatcatacgccagttacccttcttagcttctgcgtccatgatgtgaacgatagcagttgaaatagtacgtacgatcatagttaagaacaaaccagcaacagctaatgggatagcgataccagtagcagtaccaatacccttaataccttgaccaccttcgatcaagataatagctgaagctactgatgctaaggcagcatctggtgcaacagcggcaccaatgttagcccaacctaaagcgatcatttgtaatgaaccacctaaggcaacacctaaatccaagtgaccggttactaaaccgatcaaagtacaagcaactaatggttggtggaattgccattcatccaagataccttccataccggcaagaaaggcaacaaacacaaccaaaatcatttgaatagcgttcatttatttactcctaattatttattactttttttcgtcaagtaaagtttgagccttcttcaagatagcatccatattacctggagcatctgaaggaacttttcttacatcaaacttaacgcccatcttttcaagttcacggaatgtatcaacgtctttttgattcattgataatacgttgttggcgttaacatcgccttccttatatgacattgaaccaacgttgatattcttaagatcaataccgcctttgatagccctcaatacatcttctggattttcaaacaaaagaagtgcatgagtgtttccaaatcttggatctttagcaatttcttccatcttcttgagtggaacagtatgagccttaacacctgctggtgcagcttcacgaatcatactcttacgtaaatcatccttagctacactatctgaaacaacaattactctatcaggcttcatagctggaatccaaccagttgccacttgaccgtgaagcaaacgtgaatcaattcttgccaaaacgtacttgatatgaccatcaccaataacagtaccttctggaatgctcttcttactgcccttagcagcagctttgtcagctgctggagctgcagcagccgtcttaggcattaagtcagctggcttagtcttaattccatctctaccaggttgaacaactgcagtggcgatgtgctttgcagttgcattagcatccatcattctctcagttaatgcttgtacaaccattggtaaattcataccagcaacaattgcccatttatcatgcttttcagcaagtccatttgcttggttaaatggagtaccaccccataagtcaaccaagaacaaaacttcatcctggttatcaaatgaagcaattgctttttccattttgccacgaatgtcatctggaccttcatcaggctttaagataacatgtgcaaaattatcttgttcaccgaaaagcatttgcgcagattgtgcaataccatcggcaaagccaccatggctggctaaaacaattcctaccatgtaatttcctcctctagatcaaaaaatgaattcgcttttattatacgataaatatagactttaaaaaagcgttttttgaaaataatttcataaagtgacaatttgtttcaactagcccaaatgccttgcctgacaagcaaagataaaaattggtctactaaaaaagaaagcctattttcatgaattgaattatttttcacaaatttggcttcctattaaaatatatgctggttgaataatttcattttcataaaataacaaaaaaaggaagccttccgcttccttctcccctttactccggctgtcagactcgaactgacgacatcttgattaacagtcaagcgctctaccaactgagctaagccggaatattaaaaaagagcacggcagcttcctttcctcgcaggcagttgcccaccaactactttcggcgttaagaagcttaacttctgtgttcggcatgggaacaggtgtatccttcttgctttcgccaccgtactcttttgagcttttacactcaaaactaaacataatccttctcgcaaaaaaccttccagtttgcttcgctttggtcaagtcctcgactgattagtactggtccgctccatccttcacaggacttccactcccagcctatctacctcatcgtctctgaggtgtcttactgcttacgcaaaggaaatctcatcttgaggggggcttcgcacttagatgctttcagcgcttatcccttccgcacatagctacccagcgatgctcctggcggaacaactggtacaccagcggtgcgtccatcccggtcctctcgtactaaggacagctcctctcaaatttcctacgcccacgacggatagggaccgaactgtctcacgacgttctgaacccagctcgcgtgccgctttaatgggcgaacagcccaacccttgggaccgacttcagccccaggatgcgacgagccgacatcgaggtgccaaacctccccgtcgatgtgaactcttgggggagataagcctgttatccccagggtagcttttatccgttgagtgatggcccttccatacggtaccaccagatcactaagtcctagtttcctacctgctcgagttgtctctctcgcagtcaagctcccttatacctttacactctgcgaatgatttccaaccattctgagggaacctttgagcgcctccgttacactttaggaggcgaccgccccagtcaaactgcccacctgacactgtccctggcctggcttacaggtcgaggttagagcatccttcaaacaagggtagtatcccaacattgcctccaataagactagcgtcctatcttctctggctcctacctatcctgtacatgtttaaaagatactcaatatcaagctacagtgaagctccatggggtctttccgtcctgtcgcgggtaacccgcatcttcacgggtattataatttcaccgagtctctcgttgagacagtgcccaaatcattacacctttcgtgcaggtcggaacttacccgacaaggaatttcgctaccttaggaccgttatagttacggccgccgtttactggggcttcaattcaaaccttcgcttacgctaagctctcctcttaaccttccagcaccgggcaggtgtcagcctctatacgtcatcttacgattttgcagagacctgtgtttttgataaacagttgtttgggcctattcactgcggctaaccaatctcttggctagcaccccttcttccgaagttacggggtcattttgccgagttccttaacgagagttctctcgctcaccttagtgttctccactcgactacctgtgtcggtttgcggtacgggtatgtcatctctggctagaagcttttcttggcagtgtgattaccacaccttcgctacttttaattcactcctcttcacaactcgtgttgctggttagaagcatttgactcttaaccgcacttgttgcttgaacatcgttccatcgcgatgcgtgcttcacctcctgcgtccctccttcgctcttaacgatttgacacagtacaggaatctctacctgttatccatcgactacgcctctcggccttgccttaggtcccgacttaccctgggcggacgagcctgccccaggaaaccttagtctttcggcggataggattctcacctatctttcgctactcataccggcattctcacttctaagcgctccattgatcctctcgattcaacttctccgctcttagaacgctctcctaccacgtgctctttaaaacacatccacagtttcggtactatgcttagccccggtaaattttcggcgcagcgccactcgactagtgagctattacgcactctttgaatgatggctgcttctgagccaacgtcctagttgtctacgcaactccacatccttttccacttagcatagatttggggaccttaactggtgatctgggctgtttccctttcgactacggatcttatcactcgcagtctgactcccgtgtatggatatctggaattcgtagtttatctggattcagtaacccctgacgggcccctagtccaaacagagctctacctccattatcctctccacgaggctagccctaaagctatttcggagagaaccagctatctccaagttcgtttggaatttcaccgctacccacaactcatccccgcaatttttaacttacgtgggttcggccctccagtgcgttttaccacaccttcagcctggtcatgggtaggtcacttggtttcgggtctacgtcacctaacttttcgccctattaagactcgctttcgctccggctccgtcttttctgacttaacctcgctagataacgtaactcgccggttcattctacaaaaggcacgccattgcactttaatgtgctttgactacttgtagacacacggtttcaggttctttttcactccccttccggggttcttttcacctttccctcacggtactggttcactatcggtcactaactagtatttagccttgcgagatggtcctcgcggtttcaaccgggattcctcgtgtcccggcctactcaggattctgctaggcgtgcttgagatttcgcttacggggctctcaccctctctggcttaccttcccagataattcaactatctcttacactgccacgtcgcagtcctacaaccccaaatgataaatcacttggtttgggctctttcctcttcgctcgccgctactaaggaaatcgatctttctttctcttcctgcagctacttagatgtttcagttcactgcgtcttcctttgattagctatctattcactaatcaataatgcatctctgtattgggttcccccattcggatatctccggatcactgcgtacttaccgctccccgaagcttttcgtagttcgtcacgtccttcttcggctgttagtgcctaggcattcaccgtgcgcccttttctacttgaccttactcaagaattctcttctcggtcgctctacaatctgttctctttgattgtctcggttttttgcttggattatattcagttttcaatgtactagctctttttgaggtactaccctcaaaactaaacaaagtttctcagtgtgcttccgcttgctctggatacttctcttagcattcctgctctccatatccttcgcttccttagaaaggaggtgatccagccgcaggttctcctacggctaccttgttacgacttcaccccagtcatctgccctgccttagacggctccttcccgaaggttaggccaccggctttgggcattgcagactcccatggtgtgacgggcggtgtgtacaaggcccgggaacgtattcaccgcggcgtgctgatccgcgattactagcgattccagcttcgtgcagtcgagttgcagactgcagtccgaactgagaacagctttcagagattcgcttgccttcgcaggctcgcttctcgttgtactgcccattgtagcacgtgtgtagcccaggtcataaggggcatgatgacttgacgtcatccccaccttcctccggtttgtcaccggcagtctcattagagtgcccaacttaatgctggcaactaataacaagggttgcgctcgttgcgggacttaacccaacatctcacgacacgagctgacgacagccatgcaccacctgtcttagcgtccccgaagggaactttgtatctctacaaatggcactagatgtcaagacctggtaaggttcttcgcgttgcttcgaattaaaccacatgctccaccgcttgtgcgggcccccgtcaattcctttgagtttcaaccttgcggtcgtactccccaggcggagtgcttaatgcgttagctgcagcactgagaggcggaaacctcccaacacttagcactcatcgtttacggcatggactaccagggtatctaatcctgttcgctacccatgctttcgagcctcagcgtcagttgcagaccagagagccgccttcgccactggtgttcttccatatatctacgcattccaccgctacacatggagttccactctcctcttctgcactcaagaaaaacagtttccgatgcagttcctcggttaagccgagggctttcacatcagacttattcttccgcctgcgctcgctttacgcccaataaatccggacaacgcttgccacctacgtattaccgcggctgctggcacgtagttagccgtgactttctggttgattaccgtcaaataaaggccagttactacctctatccttcttcaccaacaacagagctttacgatccgaaaaccttcttcactcacgcggcgttgctccatcagacttgcgtccattgtggaagattccctactgctgcctcccgtaggagtttgggccgtgtctcagtcccaatgtggccgatcagtctctcaactcggctatgcatcatcgccttggtaagcctttaccttaccaactagctaatgcaccgcggggccatcccatagcgacagcttacgccgccttttaaaagctgatcatgcgatctgctttcttatccggtattagcacctgtttccaagtggtatcccagactatggggcaggttccccacgtgttactcacccatccgccgctcgctttcctaacgtcattaccgaagtaaatctgttagttccgctcgctcgacttgcatgtattaggcacgccgccagcgttcgtcctgagccaggatcaaactctcattttaaaaagtttgaatgattgctcattccttatttaagatctttgtctcaaatttattgcttgcgaattgacttcgcttcttgtttgggtttttacacccgcacacttttagcgaaactttgttcagttttcaaagtactacctctgtcttgcttttttgcaaagcagacagcttttatattttatcaaaccatcatttctttgtcaagaacttttttgatttgtttttttcgtcttgctcaagctttttctgctttcacctgacgacatttaaatatattaccagcttatttacttctttgcaagtactttttttctttttatttgttttctttccttacatgtctgtttttaagctctcgtcgcatctctcgaagcgactttattaatttaccttattttctccgctttggcaagtcttgctcttcgttcgcaatcttttagaaacgcttggacgcgttggaattatttctttatttctatttcaatctacctttttctttttgcttactttatttttatccttacgcttattattcgagttttactgttttttctcttaattttagtacaaaatttttcgaatttttttcaaaataattcaaaaaaacggtgttttgcctaatttttcactcaaaaatgcaaaaaaaagacgtttatcaaatataatcattcgataaacatctcattttatatctttagatgatcaatctttagtgtctattcatcttttttcttacgtttttcaacgccaagtaaactaatccaacctaaatcagcgagtaatgtaccaatcaaacctagtgtgtgtttgtgttcactaccagtttgaggcaataagtcttgcacggacttcggttttgcatttaatttgttagctaattgctttctttctgctttccctattgtcctcttgccagattcagcgtctgctgccttaactgggccgttagcgcgtttctttcgacctgtaggcataaccttcatgcttaggattgttattagagtcatagcccttcttatttgctttagaatgattatgcttcttttcactttccttattaggctttgccggtttatctggcttagcaagcttgtttggcttatccggtttatttggtttgtcaggtttatctggtttcggctctggatttggttttggcttcggttgaggtctggttccggagtaggtacttcatcttgcttgtaagtaattttaatattactgtcagccgtatctactgaaaccttttccgctgccaccttactttgtgaagcagtgtagccactaaatgttggagcagtatatgcatcccactgagtattaccatctaccttccactcactgtatgtaactttgccagtaactttatcaaacgttactttttgagtgataatcagcttagcaccaaaaggcgtaatgactgtaattattctagttggagtcttagtcaaagtatcgaagtgatcatagttcttacttgaatcacctggcactggacctgttggaacatcccttggtggagtttctggagtaacaataatggtgtcgtgttcaacccttacagttatagttggaatgccatcagcagttgcaactactgtcttaggaatatcctgtcctgaaacaatcttccatcctgctggaacttgttgatttacatctactgtttcaccggtcttgccactaagcggagtttgccctacttctttgccatcactatcaacgtaagaaatcttccccgtttgagtgttgacagtataagtaacagtgacttcactatccttatcattgccagttactttcacttgttcaaccttgttaggatttgtggtatagccagcaaattccttcggcgtaaatccagcaaatgtatccttaccatctaccgcagtccattggccttcactattggcaaccagctttacagtaaccaaatcatatacggcagtccgcgtaaattcaacggtctgtttcttttgatcttctgaaatctgagctagttgttcttcactcaaaccttcgtaattaatggttcgggtgacatccttaactaggtcatttttcttgaaccagctttcatccttagtaggattggttgctgaatcagttggatcaacgattgctgtcttgtgaactaatttaatgtacaagttctgacttaatgccttgccaaaagtatagctagttggcaattcttgatctggtgctaactcgtagttctctggaagcttcaaatcaaggttatcaacagttgagccagcaacgccagattcagctggaattccatttgcaaattcataagtcaaacctgccggaactgtaatagcagttggaacattaactttaaagtttgttccatcaattactggtacagtgctttcttgactatagttaggattatcatcttgcaattttttcaatcccttagcagttaaggcaatgtagtaagtaccggcatttgttggcgcagaaattggcttaccattggcatcgacccattcataatcaccagctgctaggttagcagtattcaacgtttcaccgcttactaaaccaattggagtgaatacaccgaagttggtagcttgagtgttaatcgttgcaggttgaccatcgtacgtcttgccatctgcgcccttactattaccgtcaagaactacattaagatccttttgtttaattgtgtaagtggcagagcctagcaggtcttcagcatccaaggtgacatttccttgaccagcgtattggttaagggctttttgcaagttaacaataccattggcactcagcttaatcgtgtaagtaccatcattaactggtgcgctgccagcattccaaatataatcaccgtcttgcagagcatacgtactttcggtagttgaacctgggaaagtaaagtgaactaaaatttgaccattgctgttaacttgtgcagttgttacagctgtaccatcaaatgtcttttggttagagccattaagttttgcgtcagcagtggctgcagtaactatgtagttagctgttgtcttaaatgtccacttgtagttagcaccattattaccagttagttgcttaagcttttcttgaccagcctgtgacaatttaacttggtaagtaccgacattcgttgcattaccaacaatttgcaaatcgtcagcagttaacttaagtgtctgagcttcaccatcagcggagtaaaccgtcgcatcgtaggttacgttgtacttattcaagttaagtccacttggtaaggtttgcttagcatcataagtcttgctgtcaccactattcagggtaacagtagcttcgccctggttaatgtacccttagtagttacatcagctgctacttgtgggtatgcgtagttagtacccaaagctttttcaatgttagccaacccttgcgcagataattccacgtggtattcaccgacattgcctggggtttgatcaaagatcaagtcaccatctttagcagtgtagcttaaattagtactattagtactatttttaccatacgtatatttacaacaacataatctttgcctggatcaggaacattaacttgccaagtttgtccagcttctttaggtagactccatgaaccagaaatcactttaaatcctggcgttgttgaatcacctgctgtttgatcccattgccaattaccataagtaatcgtgttattagcaacatttaaactaccagtctgggcatagaatacctgtatttgtgaatcaggtgcaaattgttgaccatttttgtcaccaccagcaattacatatttagccgttactgttctcgcttgctgttttactggaatatacaaaacagtgtgaactggacgggcttcataaactgaggcgttctcagtatatgctagagactccttaccctcactagatgtatcttccttattccaagttgggtaaacaaattggtttgctgacctggatcgccgctcttattgtaagcactataagaaacttccttattattttgagtagaaacatctttagtatcttctagactagtagcttttttatcttctgcctgtttagttgaattctgctcggttgaatttttgctagtcaaaggatcggtaccgctaacttctttttgagcagtagtatcgttatcattcttaccagctgtcgtagtctgatcatttccagtatctgtggtagtcttcttagccgactcaacctcttctgtttctactggatccgtagtatccgcatgaaccgtttgacttgtattcatcgtccaaagcaaagttgaaagcaaaacggaacaaactccaatgttcaattttctaatactaaagcgctgcttgccttcaaagtcatttttatttagtctttctattacgcggttttattctattcatctattttaacgcctaacataaatcacaacaaaaagcaggcttaaattatatgcaaaaaaatcgttattttaagttgtcagtcacaacaactaaaataacgattttgcttttttaatctttaattacttaaattaaacctgattccttagtaatcttcttcataccattcatgtaaggaacaagtacatcaggaacagttactgaaccatcttcgttttggtaattttccaaaatagcagctacacaacgaccaacagccaaacctgagccatttaaagtgtgtgccaagtgaagcttgccgtcttcatcacggtaacgaatttgtgcacggcgagcttggaagtcagtacagtttgaacaacttgagatttcacggtacttgtcttgtgcaggcatccaaacttcaaggtcgtaagtcttagcactagtaaaacttgcatccccagttgaaagagcaactacgtgatatggcaagcccaacttttgcaataagtgttccgcattatgagttaacttctcgagttcatcccatgattcgtcaggcttacataccttaaccatctcaaccttacggaattcgtgcattctgatcaaaccacgagtgtcccgtcctgctgaacctgcttcacttctaaatgctggtgacaatgcagtaacattgattggcaacttgttttcatgaataatttcatttctgaagtagtttaccaatggaacttcagcagttgggatcaaagttaagtcacgtggcttatctggatcgtcattatcaacgatggtataaacatcttcgtggaacttagggaattgaccagttccttgcattgatgcatcgtttaccaagtatggtgggataatttcggtataaccttccttagtgttttcatcaaggaagaagttgaagacagcacgttccaaaagcgcaccagcaccgatgtagtaaacaaaacgtgcacctgaaacctttgaagcacggtcccagtctaagatgccaaggtcagtaccaatatcccagtgagcctttggcttaaagttaaattcagtagttgggtgccacttacgaacttcttcgttgtagctatcgtccggaccaattgggtctgaatcagctgggaagttaggcaatctaagcaagatgtagttttgcttttcagttaattccgcaacttccttatctaagtctttgatttccttacctacttcacgcatagcagcaattgcatcgctagcatcttctttgttacgctttttttctgcaatttgcttagaaacatcgttacgcttagcctttaattgttcactcttagtcaaatccttacgacgcttagtgtcgatttcaactaattcatccaattcttctggcttaatgccacgcgtagccaatttcttctttgaccagtcaagattctcacgaatcaccttaatatcaagcatataaaacctccatgatatgcataaaaaaaagagccgacttatccctacacttgggacgaatcggctcttacacggcttcgcggtaccacccagcttcagtctatctagactgcacctctttaccagacgagtaacgacgtcaaaccgtgcaactattaattgcccacattattgaaatctggaagcgactatgcattcactcgcaccaaccgtgaactctctgaagcagtcttaggatttcgtgtttgcatttattttaagccattcttcttttttgagcaaataatatttttctttaaacgaaaaaagtgcactaacttgtgtgtaatcgacagtataaacatactgaaatcctagtgttttaagcaatttctgtgatttttcattatcggcaaaagttccagcccagacttctacttgctttttctttttaaaagcataggtcaaaatcaatcgtaaagcttcagtcatatagccgtgaccttcaaacgactgatctagcaaaaagccaacttctttagtctttaataggccactcttttcatctaagccgcgttcatacaattcaaccagaccgatcacttcattgttcttgcgcaagcaaacgacataactttcaggacgcgacatatattgcttcacgccattaaccgcctcagtcagattgcggtattcctcaaagccagccatcttgtggtagcggggattgccaccccacttcagtaattgctgcgcgtccctttcttcaaaaggtctcaaatatattctcttagattcaagcattagttacccatcagcttcaagagccactttgcaccaaactgtaggcctatactataggccgcaattgtccatggcttacacaaaataataatccaaaaataagtccaaaacttcattttagtcaatcctgctagcaggcaaagcacgtcatcgggagctgctggggcgagaatacataatgcaaagaaccaattaaatttattctgattctctgtccacttcatatatttatcaagcgtttcttccgaaacaatatgcaaaataaagggccggccgtagtgtctagctaaaaagaagttgataattgagccaatacaaatccccacgtagttataaataaacccagcaactgggccaaagaagaccacgcctcctaataaagacacgcccccaggaataatcggaataactacctgaacaatttgaatcaacacgaaaataatcggaccaacaatttgtttattagccagataagcccgcattttagcttgatcggtaaagatccccaagcggtaccaataaatcaccagcaacacgattgcgactccacaaactatagttgcaatattgattaatttacgactagccttagtcgatagatgcattttctcgccttccttcatcgcctagtagttcaattttaacaaaaatccagcccagataccgtaaacatgcaaatctaaaaaaagttttattattttagctactttgggcagatactatataataaagttaataagttattagaaaggtaggcatcttatggttgtaattaagaatgatattgtttatgacaagactaaagaattaaaaacggatatttactatcctaatgatacatcttctaataccaagattttaatcttctggcatggcggtggctggtttagaggtgataaagacagcgtcaaaaatctaggtattcgctttgctaatgcgggctttatgaccttcatccccgactactccttagcacctaaataccactttcctgctgctcatgaagatgcattgcactttgtcgactggctgttgaattctgaatacactgatcaagacgatatcaaaaacattgttcaaattggagccagcgttggcggtgaaatggcaattgaggttgctgggaaatacggtttccctactgtcacctggtccgctccagttgaatattcaaactggattaaagatcatcaagatactaaagcatccccagatgccgctaacgattttggcattaccgatcctgaaaagatcagacaatctttctacaagtacttcacattaacctacacaggtactgaagatgaggctgtattacagaaattagacgctaagtcatttgactatggccatctcaagcaattaatgatgattaattccgcagatgagttgacaccactagctacagtattggattttgttaagttcttagctgacaaaaacttaggcgtacagctcctcgtaattcctggtcacggtcacgccatggcctatggtcccgattatgtagacgaatcgctcgattttttatatcaaactattaagagacaaaattaagtatgattaacatccaaaaatttgttcaagtcagaaagaaactaaagttatcacaaactgagctttgccaatgtatttgtacccagtcgaccttaagtaagtttgaaaacaacggacaggtaccttcatttaaaattcttaagcagctttgtgaacggatggatattgatgttagcgatattatggacaacagtgagcacaaatatatcgcgcatatcctgtttgaagcggattttgcttttatcaattttgattacagtaaaatttttactttactttcacaaatcaaccccgaagtagacctaaaacgccaaacaaatcggattcattatcactatttgcgcggacaatatgctctaagaagtgatcgcaatcaaatgagtgcgctcttttatttcaacaatatcttgaccacccaggaattgcctgaaaatgatatttaccgcttgttggcattaaatggttgtagtcaaatctatgctaaacaaggtgaaacagagaaagccgagcactattatagtcaagtattaaagaacattatggacgtcaagatcgataatattttgactacaatgcatgccttaagtattttatgtgatgccggtgaattctatggcgaacgaaaaatgtatcgtgagtctaatgcattattgcgctatgcctataagattggcgctgagaagcacgtgattttttacatggcacgcatcctattgcggcaaggcatgaatgatattgatcagtcaaaaaagaaagcaattgctatccaacatttgcacgatgcctgtgcttttgcccgaatcaaccgcaacacgattacgctaaatcaggctaaaaaattactaaaaaaattaaatgactaagatccaatttgaaatatagtaataagagtttgttcatttgattttgcaaaaatgataaaattagtataaatgaacgctgtttaggagtttcagataggttgactttggaacgaattatcaagtttatgtttgacagtattggtagctatttatccattcgaaaaattgccaatacgttaacttcaatgggacataaaatcacaccaaatacggtagaacggtatattaatgcgttactcgacagtttgattatctatgacgtttcacgattcgatattcatggaaaagagcagctaggttcgctaaaaaaaatattacattgttgatactgggcttagatatcatttgttggcaaatcaaaaaaagatcgtggacatataattgaaaatattgtttatcttgagttgcttcgtcgtggatataacgttactgtaggtagcatccctaatggtgaaattgattttgtcgcaagaaagaataacgaaattttttattatcaagtgtccgaaacagtgctagatgaaaagaccttagagcgcgaattgaaaccgtttaacaagattaatgatcattatccaaaatttctattaacaatgaatgaatttggcaaaaatgataattttaacggaataaagcaacttaatattttagattggttattagaataattaagctaagattaagaataataatttaaaaaaagaattcgaaaaatccccatttgtagtgaaaaagcctacaaaatggggatttttttagataatcttgtaaccagtaactggcttagcaggtactgtattgaaatcaaagctagcaagtttgtccagttcagtattaccatcaataattgtagtaacaccttgagcaatcatcaggttcattactttatccttgtctagatccttagtgaaggttaccaagactacaggcttatgcaaagcacgcatgaaaccaatttcaaaagcactaccatcatctacattgtccatgtcatacaagaagacgccacatgtagagttaactagaccttccaggtcattgttataagtggcaaggcgccaagtcatgctgcgaatgccaccaatttcaggattcttttcatccggatcaacaaaattttgatcaaatggaaaatgcactctgaccactgtcggattttcttctaacaaggcacgagccttatcaactcgagcacgttgatcatcattgtaaaatggagtgcctaaataaaccttagcagttgaaacttgtttgttcatgcttttgtcccttcaatgtttaaaacttacaaaataaaattatttttcattttagcatgacttttttacaactaaaagcacaaatagctgtgttttcattgtaaacgctttataatagaaacataacttattaaagctaaacataaaacttattggaggaattattttgtctagatatcaatcaattaatccatatactaacgaagaatttgcaagctatgacaattctactgccgcacaaattgacgatgccattaacttagcacacgctttatataaaaaatggcgtcatgaaaatcctgagacccgcagtcgtcaattacacaagatagcagatgctttgcgcgagcatgaagatgacttagccaaaatgatgaccctggaaatgggaaagcttttgcgcgaatcaagagaagaagttgaattatgtgcttcaatttgtgattactatgccaaaaacggggtcaaaatgttggctcctactccaatcgaatcagacttaggcaatgcctattatttgaagcaatcaactggcgttattatggcttgtgaaccatggaatttcccactttatcaagttattcgggtcttcgctcctaactttatcgtgggcaacccaatcttactgaaacacgcccacaatgttccaggttctgctgctttaaccgctaaaatcatcagacgtgctggtgctcctgaaggcagcttaattaacctttatccaacctatgatcaattaagcgatattattgccgatcctagagttcaaggcgttgcattaactggttcagaacgtggcggttcagctgttgccgaagctgctggtaaaaatttaaagaaatcaaccatggagcttggcggcaatgacgcatttatcgttttagatgatgcagatccgcaagtattgcgtaacgttttaggcgatgctagaacttataacgatggccaggtatgtacttcatccaagagaattattgttgaaaaatctcattatgaggaagtgctacatacgcttaaaaacgtcttttctaatcttcaagcgggtgacccacttgaagccggtactaccttgccaccaatgaattccgaacgtgccaaggaaaaattagaagctcaggttaaaaaggccgttgacgcaggagccgagattttttaccaatatccagagattgattctaaaggtgccttcttcagacctgtaattttgactaacatcgacaaagaaaatcctatttatgatgaagaattatttggccctgtagcagaagtctttgtagttgacgatgatgacgatgccattcagcttgcaaatgattctagctatggcttaggttcatctgttatctctaacgatatcaaacgtgctcaaaacgtggccgctcaaattgaaactggtatgactgtcatcaatggccgctggattacctctggtgaattgccatttggtggcgtgaagaagtctggctacggtcgtgaattaagtgacttaggcatgatggcctttgttaacgaacacttagtaattgatgttactaagaataatcaatagtaatttttcgataaaagaaacatactaacctagtgttggatcatgaatcgacggattcacgatctggcactttttattttgtctaaaatagaaagtgaagataaagcaaatcaagtcttcagctttttagacacttgatgtcgtaaaagaaacggactgctttaccacctattcttaagtctcttcgaagtctgtgggcacttagatgccgtgtttagaaaattagaattaataggttgataaagaggtttatcttcacagcggaggttatattatggaatcacaaattattttcggtattgatgttagcagtaaatcttccacagtttgtgtggttaatgaccggatcaaacaaggcgaatcttttagaatctctaatgattcctttggctatcaaaaactttatgagcaactgaaccaatatttgataactcctttagttgttttcgaagctactggtgtttattctctaagcctgcaagctttcttagaggattatcatattaagtatttgaagcttaatccgcttaaagcgaaaaagctaatggacaataatttacgccataataaaactgataaggtagatgcttatcgcctggctttaattcaatttaatgccccgcaaaagttgcgtgatccacagcccagagagtatcatgaacttcagaatgccagtcgctattatgaagaacttactaggagtatagttactactaaaaatcaattgcaccgcaacctccaatccactttcccacaaattgaagaaatactgtctcatccatctggcagaatttattgggcgcttgttagtcttttcccacatgctggatatgttctagaaaagaatgagacacaggtaactcaaatgcttaattctatttctggaataggacaacaaagggcacggtacttaaccacaagattatacgcttttgctagagaagcttatccttatgattccaaagatagtattatcgttagagctattcaaaggaacatttctaatttgttttcactccagcaagaacgcgactatgtaattaactacatggaaaagctggctaaagcagtaaacgctcgtgctttatccatctatttgagtatcccaggggttgctagaattacagcagtgagattagtagcagagctcggtgatctaagacggtttagcacttcagctcaaattgatgcgtttgttggcattgatccaggaaggtaccaatctggtgaaaaagacagttctcttggcattaccaagcatggcaatcatattgccagaaaaatactttatcgagttattattcaaatggagacggtaaaggctacgcagccttgccatataactgattattatgacaagaaaaaacgatcttcaaatagccaaggctataagaaaatcgccattgcatcagtccataaactgatacgcacaatgtttgctcttatcaaacatgatcaattatatgattacaacatagccaccaaaaataaaagactttagctgaaatcaaataatcaacttaagtataagcaacctatggaaaaactacaagtattcataggcttatttgtggtactttcgctttttcttaaatttaaactcttatttgctttaaccttattcgcatcattaaaacaagtaaatttattttcttaaatcattgataatacttgactttgggtagaaaatacgctggcaacttaaccagcgtatttcttttacttattattaattctatttctttttaaaaagattatatccagccaaaatcgtggtcaacacgctagccaaaatcataaagtaagctgaagctccgagagaaactgcatatgacataagttgactcgtcaattgagccagcaccccagttgaagcatgtgccgcgcttgatatttgaaaaatcatataaatcaaaaagattgattcaatcaaagaaaggaagaaggccaaagtctgactagccttagtatttttcaaaatattataaataatgaaaattgggaacaagaatagtagcaaccagacaatgtaaagaataagtgcataccatgatgtcacgccagatgaaagcaagcgccctgctaaaccgaacagtacattggaaatagacattctctgcgtgtaagccgaggcacccgagtcggtaaagagaacgattagactaactaaagccgtaaaaataactgaaatctgcacataattaaagtgatgtttgcgaacattttttatttcacgtacatgattttcaatccgaggatatttttgcacaaattctcggtttttcgctttgactttactttcacgtgcatccacccggttaaagacatcggaaccaattcggtcaatcttttgcgttaatcgcttatcaaccgtatactgctcgatcttatctttacgatcacacacaatataaagccaaaccattagggctaaaaagccagtccaccctgccgctctagaaaaactcattaggattaaaagtaagactcccaataagaagactaaggtcgcatttttcctaacccacgcaatcattctttggacagtggtgttttgcttttcaggaataaattcttcccgataggctgcacggctgataatcttttcgccttcatctggttcttcaaactttgctttttggtgctgatctgtgaaaaagtcgtctcgatatttttttagattgaagccacagtttggacaaatatcatctgtttcactaattttatggccacaatttggacaagtagtcatataaaaattcccttctttttcaatctgttagtcattattataacatgtatcagaatttgaagatcaaaacaaaaaaagaccgaatcattgcgattcggtcgaaaaaattatttactaactatttttcaacattaattggtaaaacattatcaatataaggtgaatgtccatcagcaatcaaatctgatatctttctcaacattggaaattgtatgttcctagtatcatttccaaacttttgatatgcttctggagttgcatctttatgtaataattcatatcctaatcttttgtagaaattaacactttcgtccacagattcaagataaatcagctgaacacctgtatacaatgcaatcaccatgcacatggaaaagaattccatcattagtgctctaccaattcctgttccttggtattccttgtcaattgcaaaataagcaaggtttatatatggtgtatcaactttataagtaccatcatccttcttaacattctgtgttaataaccctactgttgacgagaaaaaaccaactatctgatttttgataggatccattaatacaaaagtctttaatttctgtgtactttcgaacttcggacattccttacgaaaaaaattatctataccacgattagtggaatcaaaatgtagggctaactcttcaaaatgtggacacgtacttaacgggcataatttaaatgctctactttgattcatgcttttccttcccacgttgaattactatcccatcagcttcaacttctttttgcaacttttttatagacacacgtggtactggattggctattttgtttttgaattctttaaatgctttttcatttttaaatgttatctcagcatttctaacaatacctaccataattaccaactccttttagtgtacctattaatattatacaatcataatctgttttactattagtttcaagatttattttaacaaaaaaagaccgaatcattgcgattcggtcgaaaaactatttattaattatttttcttatttcttcttttggcgaacttattaaggtcaattccctcatatgtcaacttagtagctgctgacatagtaattggcaaaatgaagaccaagatgagcaaaccaatatccacggctaaggcaacttcaatcaaagttggaatacctgatggaatcaaggctgcaaaagtaccacccaagataattgcggctgatataacaaccgtaccaatgatagcacatgccttcaagattcttgaacttggagtagtgtatccttcagactcaagttcacgataacgagtcatcaggaagatactgtagtcaacacccaaagcgatcaacataatgaagctgaagaatggtgtgttccaagtaagcattgacttaccaagaactgctttaacaatccattgattgattgaaagtgagcagagataagcaataagtaaagtaccaagaatgtagactggttgcaataatgaacgagttacgaacatcaaggcaatgccgataccgattaacatgatggcagcagttctaaggaagtcgccactggcaactgtcttagtatcttcaatcttggaactttgaccacccatagctaccttagcattcttcaaagcagtaccttggaatgacttcttagccatagcacttaattcttgtgacttcttagtagcttcggttgcacttgggtttgaatcaaagacaacaataatttgagctgacttcttgtctgggctgaggtaaacatccattgacttcttgaacatatcgttcttcaagaattccttagggatgtagaaagtatcagcggcagctgatgaacctaaacctctgaggtaggtttcaccttgacctaaaccactattaacagtgtcaatacctgaagtcaattgtggaactttgcttgccaacttaccagcgccagcactgagttgtccagcacctgtgttaagttgactgatacctgaaataagttgtggagcttgaccagctaattggccgataccactgttaagctgaccggcaccatttgcaagtgtgccaagacctgtgttcaattgacccgcgccattgttaagtcggtttacacccgcaccaagacgactagcgcctgacgaaagtgaacctaagccactgcttaattgaccagcacctgaattaagtctttgtgcgcctgccacaccttgtgaagcagctgattgaacttgcgtcaagcctgagcttaattggttcaaagcagtagctgcacctggaagtgccttgttagaagcttgagctaatttagctacttgagtctggagagttgataattgttgaagtgatgaagttaaagcacctaattgtgagctaagtccagaaacatctatagcagcattacccgtttgagtatcagcttgtgtattactaaatgccttattaatagctgcttcagccttttgctggtcttcagtagttaagccagcactgccaatggcttgaagtgctgctcgttttgcttgtgcctgagcaccagcagctttttgactagctgctgacaattgtgctgcttgttcttgtaacttcttcaaacttgcagttaatcgtccaacttgtgaagtatctaatccactaacagcttgattcaattgttgaataccactgttaatttgtggcaaagcagtttgaagttgagcgagttgttgtttgtttgaaccactcaattgagttgaaagttgtgaactcaattgttgtaattggttaaccatttgttgggtaccactttgcaagctgctagcaccattctttaagcgatttgcaccgctaactaattggcttgcaccactttgaagtgcgtgagtaccacttgccaaacgaccagcacctgtttgtaaacgtactgcaccactttgtaattggcttgcaccattttgcaaacgactagtaccaccaactaattgttgggcaccactttgaagacgacccgtaccatcttgaagttgatctgcaccatccttcaaactattggcaccattagcaaccttgttggcacccttactcaatttgcccaaacctgaacgagcttgatcaacaccgtcgttaaccgtgtttaattgattgttgacataaagcatatcaattggttcgccgtaaggttctgtaacagatgtcgcaaatgaaacatcttttgaagcttgaagttgcttagtcacttgatcaattaacttcaaattttcttcattgtctaatctatgcttgctttgaatgtacaagtatgatggttcagccatccctttagagaagtgcttttgtactatcaacaaaccttgcttagatggaactgaatctgcaatttcatcagtgtcatcgtagttcaagtgacctgagtacattaacatgaatggcacaacaacaactgctaacacaaccaagtaaataattggatgcttcaatgtggcagatgaaataccatgccataacttgtcatcactttcaccagtaaatttcttaactggccagaacattttcttaccaagcgtagccataaagaatgggttgagtgttaaaagcactaccaataaaacagcaacgccgaccgcaacaccaacagctgattggtaaacggagaatttagctaaacttaaagcagtaaaaccaattaagatggatgaacctgagtaaagaattgttttaccagcattgcgcaaagcgtcatgcatggccttatacttgtccatcccttttcctagattttctttaaacttgtcatacagcaaaatgttgtagtcggtaccgataccgaagagcacgataaccataaacacttgcgtaaagcttgaaaatgggaaattggcgcttttaactaaattagtaacaattgagaaggaagtaaggaatgaaacaccaactgtcaacaatgaaataagtggaacaattggtgacttaaatacgataaccaaaacaataaagataaagacaactgtaatggcttcagtcttcttaattccctcttgaattgaagcggagaaggcgtgctgcaagacatccgcacccgttacataagtacgaagcccttgcgttttcgcggccttgttcatttcgttataaactttttcaatcgtaccatgactcttagccacattaaattgtgctacccaagtcgtgccatcttttgattgaagtttctttcttgtagcaatattggaatctggaagtaatgaatccttgattccgtacttgcttttatcattagtgaacttatcaagcgtattattaatagcctgtttatcggcatcagttagcttgccactctttttgttaaaaacaagtgctactgcataagtgtttttctttttcgagccccaattgttctctattgactgtgccacattgctttgcacattacttggcaacgtaatgttagagtgatcattagtcagctgcgtaatgttaggcaaagcaacaacggaaataatcaatattaaaatccacgcaatcagttcgaaaacatggttcttcagaaatttctgcactttcctatttcctccctatttgttgtaaatcaggtactggttctacaagtcgtaaaatcatttcatgataattacgattagattcatcttctgtttcatctccaaaagacttcgatttatccaaaaaaacgtaccctaatacggcgccaattaaagcatgaaatgaaatgacactttcttttttaaaattaagtctttcacccattttaattaaatccaagatttcttgattgatggccgcatcctttggatattcgttcaaatgatacagaatacttgataaagccggatcgcttaataaaaagtcgcgcacaacatccgcaaacttaagcaatgcatccctacctgacataccgattagatcgttcatcaactcatgacgtaagatcttaatctgtcttgcaccaactagtgatagcaattgtttgcgtcctgaaacgtaatgataaagcgactgtgagcggacatcgagcgccttagccaatgctggcaaagttgtagctgtcagtccttttttagaaattaattcagtagcttgatcaattattttatccagatcaagatttcttttctgtgccattttcatccctcctttgtcttagcatagtaaataatatacacctacagtgtgaagattacaatctacatagtgtaaataatttattttttctataaaaaaataatgaagccttctcggacttcatcatttccgttacttatgcttttttataaaccaagcattaaccgttttgcccaatttattaaaattcttgtgttgcgtgctccaaacagacatacagtaagcacgtccgttagtctgaacaattgcgacagcaaaatcatcatcaccaattgcataaatgccgccacttaagccagaaactaaacttggtcgctctttagctagggttgctaaaactcggctagcatattgccgatttaatacccgaccttgatacaagccaatcattgttttagctaaatcattagctgttgtctggccagtcatatttgagttgaccttagtttgagtggcacccatttttttagcaacttggtcaatattattaactccaatttttctagttaaggcactagctgcagttttgttacctttaagcattgcgctacgcaaataacttacaccataggtaataccaacttgaaacatcttatcacccttggctttgtcttttttgctaatcttaatcgcagttcgcgaccccatcttgcctttttgttcttgctcatacaaggcgatcagtaaaaataaccgcattgtttttcctgcgtcatgagccttattagtattaaaaactacggcaaagtgactagagttagttaaatcctgtgctactacctggaagctatcatcaatgcccataacttttttgatttgcttgactagcttctgattactgcctttttgagctttaacatggttagaatattcaatcgaattaaccttgggctccttaggcttttctaattttttaacctttggctccttggtcttctttttattcttagcgaccttgctgttatttggttcaacaatctttaactgcgcgttttccacccgctttatgtttgatgtatacaaaatgaatgcaaataaagtcacaattaaagaaccaattaatattttatgtttcattaaaacgcctcaattttagaagaaatgatgccttttcatcaaaatgactaaccaaaccattaaaacaaccatcaaaataatgattaaaacccagtcaaatgaattttttaaaattggtagactaacattcatcccataaaaaccggttaaaatagttggaatagttaataccaatgaccacacagttaagaattgcatggtatcattcaaattattgttcatcatattattactggtagctgataaagtcttagttacctgctgggaaatctgcaccatttctgcagactggcttgattcaatcaagacgtcatccaagcgttcactggcttctttagtgaagtctaatttgctgtgattcaggccatgcaacatgattaaatccgtctgaattgaacttgataaataaactaaacttttttcaatattcgaaagttccaccaaatctttattgttaatgtcatcagacaacttctgatctaggctgttacgttcaacgtcaagttgcgttacggcacgctggaagtattgtgatgaatataggaaaaagagcatcaacaactcagtaacatctttagcttcagacaaacgctcccgcatatgttcatcgttgaattcatcaaacacatagctggttgattctgtatggaaagtaaagatattttcacccactactaaaaaagtgattgggtgtgaggtaaagtgcttaatcgtgttggtcggccaaattggcacatcgtaaacaagcaagtggctcttagtatggacgtcatagtcatagtgaggacgttcgtgacggtcagaaatataagagataatgtcaggcgtaaaattaaaatcctgctgcaatctctcactgtcttcttcacttaaattattgatgtcataccacttatactttgttcttaccggaaaattttgttgtctaatcaaccagctcacctcaacttttattttattacctagtaaatggtaccatttttctcaattctttttccacaaaaaaacagaccttacgatctgctctttgaaatctaattgctatttaattttattgcttccaagcagcatcaaatttttgcttaccagtattaatttggctgttagtattttgacccttttgggctgcagcaaagatattttgcaaaatgctgttcaattggttgtatgcagcatttgaattcttagcaacaggaacactgtacaagttcttcatagcatcttgaagtttagcaggaagcttaatgctcttgttattcttgtattcactagattcgattgcactattgtttacaggaatgtaaccagtagcattagcccacttaatttggcttgacttagatactaagaacttaatgtacttaaatgcagcagctttttgttcagcgctagcgtggttaaacatgtaaatatcagtaccttgttgcatggtgtatttgccaggacgtggagcaacatcataagtaaacttgttacctacaccttgcttaacaaagccttcacctgcagaagtaccaacaaacattgcaaccttttcgttagcaaatggacctgaaaggtagtgttctgaaccagctactctgaagtaacccttcttaataccatctgcatagaagttgagaactttctttgaagttgaaccactgaagttaatcttatcagtaaagttcacgccttcgtccttcataccaagagtgtagtagttggatagtgaatcaaaaccagcacctacaactttgtggttactcttcttgtagatagtttctgaaacatccttaagttcttccatagtagttggaactttcttgatgccatatttcttaaacatggtcttgttgtaagtcaaagtttcaattgacttgttaaatgggataccgtattgagttcccttaatttttgcaccatcaagaagttcagttctaatgtcagatgcctttgcactgccccaaccaacattcttgttgttgatatatggggtcatgtttacaagcatcttgttttgagctgcgttccaaagccaacctggataagcttgagtaatagtaggtaagttatttggtgattgcaaagttgagttgatcttagcttgcaaatcattgtatgcaccttggttttcaagcttaacagtaattttagggttcttcttttcaaattcattagttaattgctttaaagtagaaccttgtactcccggcatagcgttccagaagacaactgtagtcttcttagtaatctttgatggaatcttctctgaacttgatgaagaagaattgccgctctttgaacaagcagcagtgccaactagggccaaagtagcaacggcagccatagtaagtttcttactaaacttcatttggataaatcctcccaaaaaataaaactaaacaacaatatgtttttgatttactaaagcgtgattgtttgaccacgtttaggtaaaatccgttctccatatgggttctcttccagctctggatgcaatgtgtgcaccggtactaaaacagctggttgaaccccagcaatgatttccttgagttctttttcatcggcatggcctgaacagcgcaacgccttatactcaatatcattgttagctaaagcctctacaaatggtttgtaggcaggatcaaaatcccctaatggctcagcatttgagtggatatacaaaccacccttttgcagcttatcataatcggtgacaacttgccacatgtatttatgattatctgctaaaagctcatcatagctaacttctagctctggcttaaggtcagcatagtgctcctcattaggcatgtaatagtaaggatagtcttcatccaaactttcattaatcaaatgggcacgctgagcatgtaaaacgacctttcttggtgaatcggcaatgattcgcaataatcgttcaacattagtaggataagtattaaaagtgatttggcgttcaggattagccttttgcaggcgcacgatttcttcagttagttctacttcattcttagggccagtaaactcttcactgttttcatcatgcttttcttctggccaagaaacaccagtaccttcaatgattagcatatcgctatttttagctgcctgcataaagtcccgcacccaatctggatgatagccatgcaagcgaatgtcgccagtataggcgatttgcttatccggtgtcttaactaatagaccagtagcaccgtaagcgtcatgatcactaggatatatttccaggataatatcgcccaccttaattggtttcttgtattctgccgcgatgattggacgagtataagtccgatcatgacctgcagcaggaagcaagaagtcgcccttttcattcaaggctggcaataaatgagctgtaattggacctgcataaagtggaatttctggggccaaaaagttcattgccttactgtgatccaaatgtagatgcgaaatataggccgccgcatgctcccagcggtcagtatcaattggcttacccgttaatttaggatcgtaaaaattaggcacatccccgattaatttatttttaatcagagtttgataactttcatctggcaattttaactctggccgataaacttcccccaagtcaaacaatacatgcgatttgttataggccacttcaatcatcggtccaccaattgtggttaaaccattataaaaagttactgtcgttttatcctttaaggtcattgcgcactactcctcgaataatttgctttctaaagatgaagtacaaaatcaagattggcaaaacagtcaatgtggcagcagcaagttgaagttgagtttcactacctgcatcagatgcaaatgaagttaaaccattgttcaacaatctcatgctgtcttcgttagttaccaataatggccagaggaatgaattccaaccagaaatgaaacttaataaagcaacggtgaacaagccacctttagacattggcaccaaaattttccaaatatattcccaatcactcgctccgtcaatcatcgcagctttataaattgtctgtgagattgaaccgaagtagctttgcaagtagtacatgtagaaaattgaagttaaaaatggcaataccaaaccaatataagtgttcaacaagcccattctggcaatggtattgtagttagtaaagataattgcttcaccaggcaccatcaataatgataaaagtaccatttgaacaacacctttacccttgaacttcaagttaaccatggcaaaagcaccaagcaaggcgttaaacaaactcacaattgtcgttacactagctgtgataaaagtgtttaggaagtaacgagcaaatggagcttgggcgaatactttggcataatttgaccattcaaaatgcttaggaatgattgttggtggaatagtggttgtttctctaaaactcattaatccacccaaaatcatgtagataaatggaaagacagtaatgattgcgaaaatcgctaaaataatataagcaatcaaagtgccccaacgaatcttcttcatcctttactgtcctccaatcttcttcatcatcttgcgttgcaagaatgtgacaaacataatgatgataaataagacaaccgttgcggccatcgctacacctggagtaccaacaatttggaacttgttatagatgtagaacactgcagttgtggctgagttaccaacacctgcttgtccattgaataaggcataaacagatgtataaatcttaaatgcagcaatgatattcattgttaataagaaggcgatcgttggcacaagctgcggcattgtaatacgccagaacttttcagtaccagttgcgccatacatatccgcaattgtgtagtaattagggtcaatgtttctcaaagcccccatcaagataacgatgttaaaagctaaagaagtccaaacaccaaagatgataattgtcgtcaatgacatcgctggatcatcaatccagttcggtgttggtaagtgaaccgccttgagcaagaagttaagcaaaccatagtcaccgttaaaaatataacggaatacgataccaatagcgatagttgacgtaacatatggcataaagaaagtcgtttcaaagaatgacttatgctttatcctgctgaaaataaaccaggccaacatgattgaaatagccaaagcaactggcacagaaattagggcatacaaaatagtattcttgattgcccgccaaaattctggatcactaaagatatattgataattgctgaagccactccaatttagattaattaacgagccgctttgaaaactcattacaaaggcccgcaaaattggataaatactaaagaaagtaacaaagataattgttggcgctaaaaagagccacgcctttttctgattgctcttcattagtagacacgctctccttccttagtaaacaggaatactcgatcaagacgcatcttcaaattgatattatcaccaggcttaattggtgtctcaaggttgactaatgaacgagcttgtaccccatcatgggtaaacttcaaaattcgttcacgaccgattaattcgacatcatcaaccttagctgaaactgcaccatcttcttcgactggcaaaatattttctggacgaacggataaaacgtactcgccgtcagttaagtcacgtttaaaacgatccttgtctaaatcgtccacgttaatttcaaaatctgagccagtaatcttgccgccattaacctttacattaaagttatcaatcacaggattaccaacaaaattagcaacaaagtagttatttggttcaagatagaagttttgtcctaagtcatcttgttggatcacgccattattaaagagaataatcttatcaccgattgacaaggcttcttcttgatcgtgagtaacaaacaaggtggtaatacccacacttttaactaaagcacgaatttcttcacgaatcttcaaccgtaaacgtgcatccaagttactcaatggttcatccatcagcagaatcttaggttgttgcactaaagcacgagcaatagctacacgctgctgttgaccaccagataaattgcccggcttttgatcagcaagttcggtaatctgggtcgttgccatatatttttcagcaatcttcctcgcctcatccttaggcatcttttgcttgcccacagtcagaggaaacattacattctgaagtacagtcatatgtggatataaggcatagttctggaaaacatagccgatctgacgatccttaggtgctacgttaacaactgacttgccatcaaaaaggatgtcaccgctagttggattaagcaaaccagctagcatatttaagatggttgttttaccacaaccagatgggccaagcaaacatacaaggtcacctttttttacggaaaagctaacatccttgattgcttcatgaccgttatcataaacctttttaaggttctttacttccacgaatttctcatcattcataagtttcacgcaccactatatattgatttaaatttttaaatttttctattaattctaagctaaatatacgaaaataacaaataattttcatttgaaattcggggtttcaacgactttgtgaaatgcttctcagcaagtattcggcttttgttcgcatttgcttttatttttcacttatttctttttaaaaattcgggtttactaaatattgtggtaggtaccaaaaaagccatgaattagtcatggctttttgtatcataagttatctccacgttcaaattgatattttgaactattcaaggcttgacgaaccaacttgctcatcaagttcttagtctttttggtaatcacaccagcagtttcatcattagcgctagttaaatatttaataagctctctgccttccatatttttagctttttcatcaataagatcaattcggccaataccgtagctttgacaatcatcacgataggcgtttacctcataaatatattggtgatagcgtggttcaacaagcacttgtaaagttttatacaaccagtaagcactactatctgaattaaccatatgatctgccaccttatagttaagtggtgtatcctcaatattggtgtagaaaggaacatatggtgaatatgcataaaagcccatattaatccattgaattgcagccatcttggcaggaacatcatttctaatttgcaagatgcttgattcttggtttctgtctaaagcaatagaacggaacatcttttgttctttttctgaaccagatgaaaaagtgtccattggatcgtatggtgtaccgttatagtgactagttaaaaatctttgcacatcttcaacaccaatcttcttttcgggaacgcgcgtaaatggcatttcttgactagttgggtcttgttcaatgcttggattaaacaacttctgtccataccaagttcttggagtattgtaaaaagcatcagcttcatccttagtaccaaaaatatctctgaaagaaaagctaccgtcagtactattgtttaaatgattcttttctacgaattctcgaataccagctgaatacataaagttatctggatcatcaaagtcaacattttgaatcaccatgatgttaggacaaattgcgtaagaatcatcaggaacacgagccgcaacccattggtgacccgcgccagtttccagataccaaacttccttgttgtctgaaaaggcaataccgttgctttcaccggtaccatatttttcgattaattgccctaagcgcttaacaccttcacgagcagtcttcacgaatggcaaagtaatataaaccattgagtcttcgttgattccatttgctactaaaggatcatgtcctaagcagcgagcattagtagcttcagtttcagtggctgacatagcaacgttatattcgttaatgccttgctcgtcccagcgaccttctgaatcatcagcagtagggacagcagtccatttgcagccatcgccctcaaggtgcatcttaaagccgttatattttgatacataatcttcatcataatgacgggctgggtttaccacaaaaactttttcgttaatgccaccataaccgtcttcgtcacgcgcaatcatggttgatccatcgattgaagcgtccttaccaactagcattgcagtacagttatcttttttcattattgtttgtacttccttttttatttcagtaataatttttcatattattaattctactactcattaacctgcatttgccgatcaacttttgctcgaccgttattatagttaaaaacataaccgggctgcacgttatagagatagacattgaagtttaaactgccatcagttgaaacggcctgcaaattcacgccgcgggccattaactcattaccacgaaaaacagcagttgcttgataaattacacgcttattctgccgcagtgctctcctaaccttagcctcaaaaatagtctgaatcttttggttagaataagcagattgcgtaaacaaattcttaggattattttggtcccctgattgattgcgtggatcataattgccgctttgatcaattccagctgagactgaataggcaatcaagtggccccgattatagatttgggtaccgttacggtgattatagtgccagccagtcggttcaacatattgccttactcgcaagctatcattagccacattgcgcttttccaaaaaggctgtattagagcgcgatgttcgattcaatgaatcaaggttagagtaaatcacccgatttatcttccatgcgcctttgaccaaagtcgacttatcatggttgacttcggtataagcgcgactgccactcttaaaattcaaattagctaatttttgataatcagttggcgatagacctccataattggtcttggcttttgatgcatcgctaattgtattagttacatgttcatcattattgccagtaaagtcacgcaaaaactggctaccatttggatcgctgccagctttagtaaaaactccccataaaatcgcgattaagacaattaatgatgaaacaaccgttccttgtttttttcgtcttcttcgtgtcatctttttcctctaactacgagcccaatcatcaagcatgcttaagaaaaaggtctccgaaaaacgcttaatcttagcaccatttttgatcaaatcacgtgctgcattcaaatcctgattatcttttctaaagaaatcttgatcacccatgattaagtaattagtcgttgctaacactgaattgtcaacttggccgcccatattgttgatcatcttgcccgcttcagcttcgttcatatgaatattgccagacaaaacgatattcttattttgaaccggattgtgccaacctaagtcaacataatccaattcgccaatagttaggtcgatattcttaatcttgctttgtgccttttccaataaatcatcagtaaagtgctgggcaaagtcatcataaaccttgatcgtatcaagagaatcctgcaaaccgtggtgagcctcaacttgagcaattccagcccgctgcatgcagtcaagcagacggttatggcgctcgcgtggataatatgtccgcgccaaacgcaatacgtcaacgtaatcattatcaagcactggtaagccatatttttgacttaaatcatacaaaaagttcaagtcaaaattgacgttatacccaatgataacgtcatcaccaataaactcacgaaattcacgaatagcctgctcagccggaataccttccttcccaatttgctcttcagtaattccatttagcttagtaataaaagcaggaacagaattattcttggaaaacttcaccaaattagtatattgatcaacaatttgaccgttacgtaccttaaccccacctaattcagtaattcgatcgcggtaaggatataagcccgttgtttcaatatcaagcattgtataattggtcaaaaagtcaggcttttcctgtccttttttacgcaacttgtcttgcgcaccggtcacatgtaaaatcccattttttatgtaaatactcattcttcacctatttaattatttaatcaaattcatcagcatctcgtgcgaattgctatcaaaacccattgctcgtttcttaagatcagctggcaaatctgcatcagctaaatcagcggcaatataatgccaattaggaaattgctgcactagctttaccattggatcaagtaattgaggactggtctcatctacgcctaattccaaaattacgacattcttgtcctcggctcccgttagaaaccaacgaaaacgcgtattagcatcggtatcagggaagaagttagcattcagcggcatatgcaattccattggactattgcagtcctcgcactttggtactaaatctgccgttacgttgccgttcttaattgccgtcataaagcgttctactacttcatggttatccttttgaccatgattaatcccgctagaacactgcattttagtccaatcaccaaaggcattgaaaattcgattttcattaaagcctgcattttcaaaaaagtgcccgaatgtactggtcgcaataaaatattttttatcacgaattagcttttttagagcaagcatcgtctcactaggctcatattgtaaggaatattcgttgattagctcactccaaaaagcccattgctcgctccaagtatcaaatctcttatctaatgcatccccaattgtatgcacatcatacttatctgcaattttgccaaattgatcatcaaagccttcttcacttaggatatctagtccctcttctttggccatgccattaccagccgttacgatcaccgtgttagcatttttcagccatttttttgctgtcactaaatctgccattttatctctttccctttgaataacctgtcaagcgtaattgtccattaatgtattctcctaagaaaacatcactgatactattataacctgcctcttcaacttgttgctgtaaccaagcttcgcttttgtgaatcaactctaagacatcaatattagcctgaccatcactaattattgggaaacgaatgttagcttcatcattttcaataatagttaattgcccgttttgctcaaagatacaattcttaatcttttcaacagagtagatacctcgactgcgcaatttaaacattaattcattagcggagattcctgctttcatacagttgccaactaacaccttgccatttttaattacttgaacaggtttaccatcgataatccctctaatccaattattgtgatcacggctgaatttcaaaataaaaacaaccaacgtccaaacaattagaactaggaaaaactgaagaattgtaatactaggattgtaaatcaagccaccaataattccacctaaaacataattctgcaactgatctaatgcagtcgtaggagccagattagacttaccaaagacattgatttgaatgattaaagttaagataccgagagcaaacttaatgaataattgtgtgtaatctagctgcattattttattacctctactttatgatcaattacatgggcttgcgttaatgtgtaagtattgcgatcatcattaaggtttaactgataatcaatatttttagaatcaatccttacgatcatgccattagttaaaaccgttgaactaactaaaacatcagaagtcgaaacattttcatctttagcaatcgatttgatgaatggcacgatttgaatcgcctgtgatttttgcgtattaagttgcacatatttttcatattgcgtaccggcaaacaaaagcaaaaataataaggcaataatacccaaatcgcgatacttggttgcaaaacggttatgtaaatatagcaaagcaaaaattatcattgctaacgccgagactgtcaagaagtttgtgtaaataatctctctcgttgattgacttttttatttatcttttaatcaaaataggattctagggtgtctcgaacttgcccaaatcctttatgaatcctgttaaagtaacggtcattgtaatccattgcctgaactccaataaaggtgtcaagcgactgctcagttggaaattctgttttaggcttggttttccgcttaagcctgttgttaaaggattcaatcatgttagttgagtaaattgaagctctaatagctggcggatagttgtaaaaggttaacagatcaggctcaacctgtctaagatctctaactacgtttttgtaggctttttcccagttttgatagaattcatgcagcacctgtacagccatttctttgtttgactgagtatgaatctgcttgaattcatccagtgctttttttcgatcgtcaacccgcattttggcactgatattacgcatgacgtgtaccaagcagcgttgaaaatgcgctttaggataggactggcagatagcctctttcatgccaactactccgtcagacaagaagagctctacctgttcaaggccgcgactcttgaagcctttgagcatttcgctccaaatctcaatattttcagtaggcgcaatacagtagtcaatcacttctttatgaccattaggtttgataccgatggcgatataaactgcttcgcgctcataagtgacccgcttaagaggaatataggtggcatcgagataaacgcagaagaacttatctgacagatgtcgctgatgatatgcctcaactttgggaatcatttctttagaaatattggaaaccatagctggagaataatagccgccatacattttctcaatcaaatcagcgatttctcgggttgtgacgcccttggaatagagcttgataacagtttgctctaaaacatcagtatgccttttataatctggcatagtgtgttgatgaaactcaacgtttctgtctctaggaactttgatttctatttgtccgaattgcgtatcaaccttgcggtaataagcaccatttctagagttgccagtattccagccatttctggcatagggatcatagcccagaaaggcagtcaattcagcttctagcaagttattaacagcctgttgtagttctttgcgcaataaatcatttattttgtctggattgaatagagcttgagcaaaatctttggtaaaatcattcatgaaggagttcttctttctgtatgtgttttttttgttcaaaccaatcatacgagaaaggaactcctttttctaatgtttaaagaaataaatttaaggaatcattcatccttacacaaactattttacagtctcctaacgccgccaccaacatcaaagcatataatactgcctgattagtattctggttattttgaatatatttcattgtataaaaggtcatgctctacctcacccttcatatttttctttcattctaacacagaaaaaaagtagcactttcgtactacttttactagaaattattcacttttcactattattaattatttttgaatttcttttaatccagctttgcgacggcccatgttaaaccatggtgaaacagtgaaggctaacacatcattaattacatagatcaatgaattaattgccatggctaagtttgcatcaccttgagcataagttacgcccaaaagaatcaactggaagacgccactagcagtccaccaaaagtattgattgttgtaacgcataaagcacatgatcccagcagttaatgaaatagcaaaactaatagcatcaatccaaggacgaggatcattggtaaatttaccaatcaaaaagccggatacaacataaacaagtaaagtaccaacaatagcaacaagccattcctttgaaccgaattttcttaagtgattcttagtgtcatcattccatgatctaacagcaataataactggtaaatctaaagttgcaatataagcaatctgttcaaaaatggaaagataattcttagctgaccaacctgcatagataaaacaagcagctgaaatcaaccccaaccaaccattaattgctttagtagcgttaattgccaatacacaaagtgtacccaaaagcgtaccaataaaagtaatcaaagttacgcttgtaattttgccttgaatcagcaaagctaattgaaatccaaacgcaaaaaaccataaacagtaattttgaactggccagcctttcaattgattaaatagccaaacaaaataattttcgtgttttctttccattgtactgagacgtaaaaagtagacaattaaaatattggattaatagaggcttgacttcgatactctttcggggttaagccttttaatctgctctttatcctttcgttgttatagtattcgatatattcctcgattgcttgagttaattcttgaagattatgatacttgtattcttgatcatagaacatttcagttttgagcaggccaaagaagttctccattagcccatcatccatggagttgccctttctggacatgctttgagtaataccatggagttttaaagctcgctgataacgagggctttgatactgacagccctgatcagtatgaaaaatgcagttattaagagctgtttctttggcaaaagccttgtcaagcattgtcattactaaatccatatctggatgtttggagatagtataagaaactatatcgccaccgcagccgtctagaataggcgataagtaaagcttttcattattaagatgaaattcagtgatatcagtataccattttgtgttaggcagggctgcgaagaaatcacgatgaattaaatttggagctattttgccaatagtacctttatagcttgaatatttgcgcttattgcgcctgatgcctttaagacctaatttatgcatccaatagcgaacggttttctccgtaactttccagccctctctgattaactgcaaagctactctgcgatatccatagcggccttgatgatgattaaaaatctcatggattctagcaataagctttgaccgtttaggcttggcgggctgtcgtttgataatcttgtagtatgagcttctggcaattataggtagctcagggtgctctgcaatcgcagctaatacataatttaaactaactttgaattcttgccttagatccgtaatcaccctagctatttcttctgatcttcttggtccaaggcacttagtttttttacgtattcgttcacaatacgcaatcgcaagttttcttctttcagctgctggatctctttctccagttccttgcgagatttctgcttttctttggtcacgggcagggcgtcctttctgtttgataatgacattatacccgtttttcttatattctctaatccaattgttaagcatgccaatacttttaaaccccagttccaaagacagctgtaagtatggtttattgccaaagattgcttgttcaatagttcgctgcttaaactctttggaatagctttggtttttagtagttaaaatttctattccatgcatatcaattaatctaagcatatagtctaaattagctagattcattctgtacgctttagccaattgactgattgagatattttcatctttccatttatgataaatttctattttttgttctttattaaatttagacatagtaaacattctaagctaaatagtgaattagttatccgacgggataattgattcactatttttattcttttgtagaattaaagtagtggtaaaacgatatgccctgaggtctttagacacttgatgtcgcataataaactggcagttttacttaagttttcaatagtctcttcgaagaatgtggacactagatgtcgagtttagaaaattagatctgatttcttaagtaaatacgttttactactaagttttggaggtttttattatgcaagttacttttggaattgatgtaagcaagtctacttctactgtttgtgaactaattggtgaaagcaaaaatgaactaaccattactaataatcgtcctggttttattcaattgcttcatgaattaaccgctttttctaaacatccgcaaattatttttgaagctaccggtgtttattcacgcagactgcaggcttttcttgaagactacggctatgaatatgttgttattaatccgcttaaagccaaaaaagagatgaatatggggctacgctacaacaagaccgataaaactgatgcttatcatttagctttaattcaaagactttatcgccatccggttaatcaaagcgaatcccaaacttataagcagcttaatgctttgagccgcttctatgaccagctgacaagtgacttggtaatagctaaaaatcgacttcaccaagctctacaatcgacttttcctgaaattgaaaatttattttcttctgctaaaggtaaaaattactggcaaatagttgtgcgatatcctcattgtgacttagtaagaagagaagataaaaaacagcttattaactggttaatgagcttaaaggggattgcttttaaacacgctctaaggactgcagataaattaattgaattagcttatccagttgtatcttgctctagcatagaagtcgagcaagtgcagtattatgcacacagattgcttaatttaagtgatcaaagagaaaatttaatcgcaagaatggttaagttagcgaagtctttgcctaatcatgatttagaaaacctagaaagcattccaggctttgcacagaccactgctgtcagagttttagcagagttaggagatttacgcagatttagtaatcctaataaaatcaatgcttttatcggaattgatccaggcagatatcagtcaggagaaatggactctaatttaagtattactaaacatggcaatgcagtcgcacgtaagttgctttatcgagctattggacaaattgataatgcagctaagacaaatccgtgtcatatagcagattattatgaaagcaaaaagctatcctctcaaaccaaagggttcaaaaagatagctattgcttcaattcataaactaatcagaaccatttatgccctgattatcaatgatcaaccatatgattacaacgtagccacacataatcaaaaagactttagtcgtaattaattgatcaagtacattataacgctaagcccaaaaatcagatatggatctgggcttatttgtcgtgtctaactaaaaaaataaatcgacactaaaagatgtttaagttgaaatttaaacaaaaaatgaagccaaacttcttattatgcttgactttacgtagaaaaagacctaaaagtgtctaacttttaggtctcagttcacatcctattcaacattccccttttttattttaggttgcaaaatacaagatcttgtgccttatccgtgctatgtaaaaaaacatcgatatctagtatagtggaccattaattaaatacaagaattgacatttttaatttttgcgttaataacatatttctatttccgtttatcaagcaaacatttattaattttttctaaacagcaaaaaaattttgttccttttagtgacacagtgtcatatgatatatacgtgattattaatttatatttttatggaggtacactcatgtttaaaactaagaaaacgcaatttgctatccgaaaattagcacaaggcgcctcagcagttttactttgcttcggcatattgggcggagcaagtgcacctatcgttccagctgcaactacagatgacccaacaaaaacagtcactgaaagtacaattaatagtgagaatacttctttcaatattgaaaccaccaccaatgcatctgataaattcgcttccatcagcaaaaatgggggggtacaacggtagtgccaaattctgctgagccagtttctccggatcagtccattacagaaaatgataatcagcaagaaaaaactactgtagagaattctactgagatatctgagcctgtcaaagacatcaataagtttgataatgatgccaatgttgataaagacgaaacaatcactgtaaaaaagccaacaattaatgtcgacactgaaaaggtagaacaaggcgatgaaacagagaaaagtaaactcgaagaaattaaaaagtatattgaggacgtagccgcaaaacatccattaggcattgccggaattttccacctttttggtaacgaaatagatggatctgctcatattgcaggaaatgtcgcaacagacaaattaagtgctggcaacttcggtactatccaagatgccactagtaacttgactacttgtgatattcattacatcggcagtattgatcatttgaatcagattgatggcgaaaataaactagttatttttggtccagatgttgaatataaatcatacgaaaatggtagttccattcaggtaaaaataaatggaaattggcaaaaagtaggaattccatacaacaaaactatcagagctgaccaaattctagatattcaaggcgaactagataaattaagcgataaatcagacgaatgggctaagcaaacgcaaaccgaaggcgtaattgctgatttcaaggagggtaaatagttggatcgacgtttctaatgctatcaaggatggcagcaaagatcctatttatgtaactattgatgcaaaatacctttcaggcaataacaagcatgaaattgctattaaaggcatccctgcagacgcagaaacaccaatcatcatcctaaatgtaactaatgttcaaaatggcgatttaaccgttagcacaagacttgttttggattattcagaccaaactagcatcaatggcgtaagtgaaaaaccatctcaacttaataagttattatggaattttggaacagatgttaaaaatttaactattgaaggagacttccatttaggtagtattttagctactaacgcacatattaccgctaacaaaaatgttgacggtaatatcattggtaacaaaatcactattaaaggtgaaactcaccgttgggacctaactccgccattagtagaagttgaaactccgccggaggatccaaaagatccacctaaagaccccgaaaagccagagaatccacctaaggatcctgaacctactcctgagcctgaaccggaactaaagcctgagcctactcctgatcctgaagaagagagtactcccccattaccagaagaagtaattcctccaactgataatgaaaattcctctgacttcaaggaagaggacactgctcctctaccagaatctgttgtagaaaaacaagttaaaaagaatcatccatccccttcaactactgaagaaaatattgcacctcatgctgcgactatcccaacctcaactataactgaaaaagaaacagttttacctcaaaccggtgaaagccaagacaagctaatgacgattggactcatcactactagcgttgcttcattgtttgcagtattaggcacagtaatcaaaaaaagaaattaattaaaaatgattcaattcaagccatttttattcttaaaataatctagaattaagtgaggattaaaccatgttaaaaaatagactaaaaatattccaacaaattcttcctactaaggcaactaacactccaaaataccaattgcctatcaactattacgatcctgaaggcagcatggttggcacttattctggaattaacttggcggcaaatgaaactatcactcaccaccagctcaaaagatttatcaacatccatcttcccgaaaactacgaagtttttccttactttgcttatcctaaggagaatatcacctgtgaaaatctgcctgatgaaataatgatcacaatcagattatctaattaaaaaaggcgactcgattgagtcgcttttttcattgcaattgatattaatgttgcgaagcaccagttgtagtatctggttcttcgtgcttttcttctttaacttctgcagccttagttgaagcaccagttgcggcgtctggatcagaatttctacggtaagttgcaccagtagttgcatcatcatctactaccaatttttgaccagtagtctcacagaagtacttaactaatggatataagtctttgacccattcataaataccagcatagttaccttggtcgtcttctacacgcttataatagtccacaaccaacttcttcaaattgcctgttggtattggcatataaacatcatcatgacctgcttccttagtccgcaaagcatgaacaacttttttaacattcggaataacgtcacgaacatctgggtgaactgcgcgcatcgtatcacccacttgatctggcgtagctagcattttcttgttaggatcagttggacggttataccacaagaattggttattatcatcaacaaatgtcattttaccaatggtatttctcagcatccaattaagttggttaacagttaacagacctgcatcaagtttgacataatcgtcaccctccgcagcatgaacttttttagctgctttatctagccaatcaggatcatttttatcgattccctcaactgtatacttagacttaccctttgcatcgaaatcttcttttaagtattcatcggcattcatatctttaagccattttggttcagccatagtaagaccccctcgtatgaactttgttaatctaattatataatgtaagtggtttcaattcaacaattttaatatattttatataatatttttactagctggattatatattattttacgcgtggtgctagttaaatctttctagacaataagccaaattataagctaaaattgcaatttccaaccggctttgaaagcctatcagactacgtgctcgattgttctcggcattgtaataggtcagaagcgaaaagtcgctttcaattgttctgcgaatagccatcaattgatgatcattgtgctttttagctcctgtcatatttttacgatatggtgtccaaagttcgtaacccatttgttttagctgttgatgcagttctttgcctaaatagccttcgtcgccaagaagatagtaattagatggatgggtattttctatcagttcaactgtctccctggcatcatgaactgatgcctttgttacgacataatcaagaatgtaaccgtcatcgctaacaatggcatgaactttgaaaccatagaagtaaattttcttggtggccttataaccaatgttggcataaccgcgaaaaattttagcacgatagtttcgaattggttggcaaacaggtaccggaaagctgtcaatgatcaagaactgtccattcaggtcaacctttttattcatttcttgccgtatctgataaatcaattgcaatagctgacgtgaacgccgattaaaacgtgagtgtgataaacaattgaaacattcacagaatcttctttgtgattcaattcctgtcttagcttgccagataagtaaagccaaaatcagactgtccgtagttttaatttgatcaatatttcgccgatgagtaaactcagccggtgcatacaaacgataccagtgccgacaaattatcactaaatctttaaaactaacttgtaaatggtggctaaaacgcttaagcttaaggcagttcaatcagatcagactcttttctattattactatttacaagtcgagtctaacaagattggacttttttattaactaaaacgatttaactagcaccctgcgtattattttatataaaaaaagctgatcaacgagcaactctttacatctttgtctcaattgtatgagtgtccaaatgaatgatcacgtcaaacatcgctttttcttctggtgaaatcttatgagccacctcaataacagcaatacgtggattcttcaacagcgtcttatgaatgcctaacgacaagttcgggtcaagcgcacttgtcgcttcatcagccagcaaaatcggccgatctgataaaagcgcgcgagcaatttctactctttgaatttgtccacccgacaagccactgccgttttcacctacagccttgtctagaccctgttcctttaccaattcatctagaccagcctcatgaataacttctttcaaatgctcgtcactcactttacgtcctaacgtaatgttgaaacgcaacgtatcatcaaacatgaatggcttttggttaacataggaaaaataattatgggcagcatcccaatttcccgttacatccgtaccattgatcaaaattttaccgtctttgggctttctcaaacctaatagcaagcgaagcaaggtggtcttgccccaaccacttggcgccatcaatagaactttttcacccggcttaactgttaagttcacattctcaaagatgcgtttgtgatcactacctgtaacataagataattgttcaacctccataccatcaaaatgatcgatcttctgcttatcatctttcagcacgtgatgcaaagcgcgctgggtcttttcccacattggcacagtcgacttgacttggttaaattcgttaaaaagagtcacgattggcgtgataaagttcaaggccaaatcgaccatcattactaatgtacccacctttaaatttccctgcagcatcataataccgccaatagtacatggtacgatgaagcaaaacaattcagcagctgaataaattaattctagtgcccaagcttgagtcaacgtcatattacgcagagcgttctccattgcctgggccgcaccagctgctcgtgtaacgatgttggtgcgcacgttataaagcttggtagcctgtgccccatttaatgaatcggacacattttgcgtatagttagcgttagtcgttgcccaaatcttggacttacgtgtaatgataggactagtaatcatttgaactaatgctggcgcaagcgtagcaatcaaaaatactagggtcatctgccatgaactataaaaagcaaaagtaattgccccgaaaaacgacaaaccttggaaaatcatatccaattgtgccgttatccgattagtttcaatctgttttaaatcgttggtcatcagtgataaaccgctcttgatatcaggctcaccttgatcaaccaaataacgcaagttagtgcgcttaaaggtcatattcacgtcacgaataatgcccatctttaccgtttcatagacaaagttactggccataaaacacatctgacctaaggcagtcaaagcagccaggcgaatcaaatgcagataatcatgcgatcctgacgaagcaacattcaacataatttgtaccatataagctacaaagacgatgttgcaggccttgattgcggccaaaatggtatagctaataatttggctttttttagcgtacttcaggctcattaatttctccttttctatcccgttagaaacattatacccgctagcttgtctttttctcaattagatacgataattagagtaatcattttaatttttaatgaaaagcagaaaggaacttttaatgaagactggtactaaaattattactttagacaacggttatcacttatggaccaacacccaaggtgaaggcgacattcatcttctagctttgcatggtggtcctggcggcaatcacgaatattgggaagacactgcagaacaattgaaaaagcaaggcttgaacgtgcaagttactatgtacgatcaactcggttcactttattcagatcagcctgactactctgatcctgaaattgccaagaaatatttaacctacgaatatttcttagatgaggttgacgaagtccgtgaaaagttaggacttgataacatttatttaatcggccaaagctggggtggcctattagttcaagaatacgccgttaaatatggtcaacacttgaaaggtgcaattatctcctcaatggttgatgaaatcgatgagtacgttgcttcagttaacagaagacgccaagaggttttaccacaaaccgaaatcgacttcatgcacgaatgcgaaaagaacaacgactatgataatcaacgctatcaagatgacgtacaaattttaaacattaatttcgttgaccgaaagcaaccatctaagctttaccacttaaaagacattggtggaaccgctgtttacaatgctttccaaggcgacaatgaattcgtaattactggtaaattaaaagactggcatttcagagatcaattacacaagatcaaggtgccaaccctattaacctttggtgaaaacgaaactatgccaatttcaactgctaagattatgcaaaagaagatccctaactcacgcttagtaactacacctgacggtggtcaccaccacatggttgacaaccctgacgtatattataagcacttagctgactttattcgtgaagtagaaaatggtacatttaagggcgaaaattaattaacagatattcaggctggaatcgatttccggccttttatttttaaggaaaatgatatggatgaaaaagatgtcaaaattctgctagttgaggatgaagaaagcgtcgctagcttcgtcaaaactgaattagaatttgaggattaccaagttgtttgggctgaagacggcaaaaaagcattagacctttttactcaagaaaagccaactttaattttgcttgattggatgttgccagtatatgatggcatgaccgtgttacggcgaatccgcaagcaaagtgatgtccctattattatgcttaccgccaaaaattctgcctctgatataagctctgctcttgatcagggactagacgactacctcaccaaaccatttgaaatcgaggaattgctggcacgaattcgggtagtcttgcgaagactggaaaaaatgcggcagcaaaatgacgtccctgatacttccctagaatttggcccattaaaaattgatctgcttaagcacgaattttactgtgacaccgagcaaatttatcttactcctaaggaatttgccttaatcactgaactaatgcgggaccccgaaaaagtcaaaagtcgtgacgagttgcttgatacagtctggggatatgactttgttggtcaaaccaatactgttgatgtttatattcgaactattcgcaacaagataggcaatccctacaaaaagatcattaaaaccatgcgcggcttgggctattgtttgagaaaattagatgataatcatgaaaaaagctgatcctcaaacaactacgcaacaattaacccgtttattcgttaggctatttgtcgctattttaattctggtcaatttggcttttctaattatttcatcggcctatatttattaccaagctgaacggcaaagtgaacaagttgttgaagcagtaaaagaaaatcttgattcaaaatatgactggtcggctatgctggatgcttatttggcaaaacaagacgatgatgccatcattttaaccacccctcaaggcaaaagttattactctgaaaatgctcacgagacctttaaacaaattaatcgccaaaatcattatcaaaacatggtctattccaataagcatatttacttcttacggacggaaaactcgcatgactttaaaatcaaggttgcattaaacattgatcgcttatttcatttaattatttggctatttgggacaatgattgtcatcaacttaatcgctattctgctgagcatcccccttattcgccgttttgcccacaaatggagtcgtccaattcaggtaatgaataatgaaattcaagaaatccagcaaggtgcttcaactgagcaaatcacagtgccgcaacaaccattagagattcgaaaattagcccagtcttttaacaatctgctagcttttcaaaaacaggccttacagcgtgagcaacaattcgtcagtgatgcttcacatgaactcaaaacaccaatcgccgcaattcgaggacacgttaatttaatcagacgccatggtcaagccaaaccagaaatcatccctaagtcactggattatatcgatactgaatcaaaaaagatggaaatattagtcaacgatttactcaccttaggaagaatcgaacgcaatactgaagtcgtcaaaattgatttggtaagaattattaatgaagtagtgtcagaaatacagtcagtttatccacaaaaaatacagactgacatgccacaagtattgaaatatcgtattaattcactagattttcacaacattgtgcacaacttagtggaaaatgcggcaaaatattctcctcaagacagcactattgtagttaaattagctaaaaataaaggacaggtctctttcacagttgcagacaacggaatgggcattgcgccagaaaatcgcgagaagatctttcaacgttttttccgtgaagacacgtcccactccaataaagttaaaggatctggcctagggttagcaattgtcaaagctgaagctgataagtatcatggtcaaattaaagttacggataatagtcctcagggaacaatttttacagtttcttttcctacagaaaaatgaagaaatcttcatttaaactctattaaatcttagttttttaaagctgcttagctagtaagataaatatatcaagttaaagcaaaacaaaaaattatcaatagtttaaaggagaacatattatgaagactattaacttaaagaaaattactattactggcgtagcattactcggcttaggaactgctgcaattaccgcaactaatttagctactgaacctaacgtggttcaagctgcttcaagcaaaattaaggtttcacaaaattcagctgttaaaaagtttaaggcaaaattcaaggcagctaaagtcgaatcaatcagcttagataaagaaaaaggccgttacgtttacgagatcgaaggcttcaattcaacgagagaatacgaaatgaaaattaatgccgcaactggcaaagttatctcatcccactccgaaagacttgatcgagacgagcgtaataaaaaagcattaaatctcagcaaaactatttctcgctcaactgctactaaaattgctcaaaaaagagtatctggcaaggcagttgaatggtcattagatcgtgaaggttcaaagaatgtttgggaagttaccatcagcaagaacggccaaaagagcgaagtaaaaattaacgcaattactaaaaaagtaatcagtgttgaacgggactaattgagaaaagaaggtatagaatagatgaaatttactaaactgacaagtattgcattattaagcgcagctttattaacaggaactgtagcatgttcaaaacaagataattcaactgctaaaactactacccaaaagagtgttacttcatcaaaggttacacataattctgaatcagcaatgagcaaacaaactcaaaaagataatattcaaatcaaattaagccagcaagaagccattgataaattccatcaacaatttagtggcaaacagcttaaaagcattgaattaaatcgtgaaggcaaacattacctttatgaaattgaaggattcgattcaaacaatgaatattctgttaacatcaacgcagaaactggtcaaattggacatgttcattcagaaaagttagatcatgatgatcgaaaccaaaaagctctagatttcaagggcaccattagccgcgacgatgctagtcgtatcgcagaagagcacattaaaggcactagcgaagaatggaaactagagcaagacgaagacactggtaaaacatactgggaagttaaggttaaaaatggtcatcaagaaaccgaagttaaaattaacgctcacaccaaagaagttatttcaactgaacatgatgattaataagattaagaacataaagaaagccgcaacattattctcgaagttgcggctttttattttgtctaatttttggataacttttttaccaataaccaatcagtttgaggatcgctaccaacttggaaagtatgctggctcactttttcaaatccatgacgcttataaaaatattgtgccggaatgttcttttcataaacgcctaaccacatgtaatctttgccttcttctcgtgctgtcttttctgcaaaatcaaacaaaacattgcccaacccgcgatgttgaaaattagtacgcagataaattcgttccacttctagagcattatcacgtaactgctcagtctgagcatccccaacattgatttttaaataaccagcaatttttcctttaaccattaaaaagtaaaaacgactattaggattttcaatctctctaatcaacttttccgtctgataatcttcctctaaaaagcgtttcatgtcatctggtgcagtataaggatcaaaagtcgttttaaaagtttcacgtgaaactttctgtaattctttcacatccgctgttgtaattgctttaatctcgtacttcatcaatatttcctctttccaccgttcttaaccaggtgccaattttcactggcattcttttctacaatttgtaacaaagcagctaattctgttctctgtttttgatctagtcctgtcaaaactatttcatttgaataagcattttctttttctattcgagcagctaatttatctcctaattctgtcacaaacaaatgcttaatctttttattctgctggtcattttctttcctaatcagctgattttgttccagttttttaatgctacgagctgccgtcgtccgatcaacattaagcatccctgctagatggtcagaaataattcccggattttctttaatgcgggctaaatacaggtactgacctcgattcaattgcatctctttaaattcaatattagcaatcgaatcaagtgctcgcgcaatagtgccaatttgacgcaaaatatcttctttcatgtttttcacctaaaaactattatatttaattttgttgtaattgcaacaataaaatataaaaactaaaaaagggatcgctccctttagttaattcatcaatttttctttagttcatttagatcgactacctgatcagctaactgcttaacttcatctcttaagtggtgagttaccataattacggttttatctttttgcgtcaaaatcaatctttctaattgtacgctagaagctttgtctaaggcagaagtagcttcatctaacagataaattggtgtatcacgcagcaatgcacgtgcaaaagcaacacgctgtttttgcccaccggacaactgtttaccttggtcagctaaaacagtatccatgccatcaggcaacttagcaattagatcctctaatccacattctttgatcacttcagaaatttttgcttttgaaacttggcgtcccaaagttaaattccaccctagagaagcagtaaaaatatatggatcttgctgcaaatatgtaatctgatcatgcaaatccttatctgaaatctggttatattccacatcagaaatttcaattttcccctgataatctctaagtaagccagaaatcaaattcagcagagtcccccatcagaatatatttatttttcagtttaaaatttaaattcaaattctcaaagataggcttatcttgtccagaatactgataagaaactttatccaattctagattgcttagtttaaaatcagcaggcaaagctccatcaacagttttaagcggtatagtcttaaatttttctataattggtttaactgatttgaattcttgccaattaaaactaatcccacttaattcagcgaaaattgtactggcaaaaaattgtgccccactgatggtcccgactggcgttaattgatgcaaaatcaaccagcctgtttgccctaaaatgataacttgactgataaaggctagaccattggtaatcgcctgagttatcccggctgttttactataatttagcgcatgttttttaacatcatcagaagcgccattgatctttttgacgattgtttgcggtaaattggcaagaaataaggtattgaagccattcaacacatcattaattgaattaaccaaacgttcattggcatgggtatattctaatgaccttttggccaaaattttagaaaacaaattgggaaccactcccataataattgtcaaaataatcacagtgaccacaagactgacattgaagtacgccaaagtgagcataccgaaaacaatttcactgatttgtctaatgatcatcatgaaatcctcgacaccaaagttattaatggttgtaatgtcattggtcagccaagaattgtaagtagctaccgtttgttgatgaaagcctgaataactcgtctgtgatagatcttgcgcaatgtcatttctaattaatttatccacattttgtgccaaacgggtttgctcaacattgactagacagttaacaatcgcgtaaaaaatataggcaccgcccattaaggcaacccacatgaaaaaacgctcagcttttaattttgcaactgcacttaaagcattagcgctagatattccggctagtgtcaaaaagcctgcattaatgactattaaaaatgtaacaaataaaaattcccactttaatcttttaaaatattgcagtaattccattgattctccttatattaaaaataattaaattaataatactatatttatgtatttgttcaatattttttaatactttacttaaattactgcaaaattaaaagggatcgctcccttttaattagtctacataagcatatttatatgaccattgcgtaccagcagtattatgaatgatgccgtgaactcgcttgttttgcaagtaagctgtggtctgttgataaatcggtgtaatagcctgattactatttacaatcttagctgccgaaatcagatcattccagcgtatgtcaggattattggcgtcttgattgccagcttttttaaccaaattatcgtactcagaatttgaccacttaccgtaattgtaagacgtacctgtcattggaatttgcataaatgtcatcgggtcgttgaagtcgccaccccaatgagagagataaatgtcaaagttgccttgatgtgctcgactggtggttgacttatcaggaatattggtaatatttatcttgattcccttcaattctttggtccattgtgactgcaaatattgggtcaattgatcactgtctgcttcatcatttgaagataaaacatcaaaagtcaaactcttttggccaatctcctgtaatcccttttgccaatatttcttggctagagctggattataatcaactgtatttttcactgcttgttctttagcaaaatctatacctgttttaggatttgcagccaaatcattggcaacaaagccttttggcagagttgagccattgcctaaaacctttttagtcacaatatcacgatcaattgataatgataaagccaagcgaatatttttattattcaaggcctttctattaactgcatttttatccttaaaattataaagcaagaaacgcactaacgaatatggatattgagtaaagtcattattgctcttcaagtttttaacttgctcacttgaaagtggagttaaatccaatttgccctgttgatacaactgataaccagtattgttagacttaactacttgatagtgaatcttgttcaacttgactaccttcttgtcccagtaatcattattcttaacaaatgaccaggtatcattagttccattccatcctttaatcttgaaaggacctgagtagacttggtactgagccttggttgcgtatctattgccatactttttcacaactttttcgttttgcggcccaaatagtggataagccatcaatactctaaagtaagcgatcgggcgatttaacttaaccactaccgtctttttatccggtgcagaaattcctaatgcattaggtgatttctttcctgcaatgattgcgtcagcattcttcacgccactaaaaagataggcatacggagaagcggtcttaggattcaagcttcttttccaagaataaacaaagtcctgcgctacaatcggatcaccattggaccacttagaatcacgtatcttaaacgtccaggtcttaccatctttagatacggtcccagttttagctaagccggctgttggcttaccatttttaccaagacgataaaaactttcgaatacattgccagtttgaccaaatccggtagacttactgatatcaatagtatctagtggagctgtggtgcttaaatttaaagtgccactttgagctgccgacttactactgctattgccattaccacatgctgcaagaagcattcctaatgaaatagtaacgactcctgctaaaactccctttagtttcgacataaattttcctttctcaaacaaaaaaatgggatgtactccaacacggaatacatcccattaagaaccacaactttttaactagttaatcagtaatagtcttaagatgaatcaccacatcagagcatgtcaaataaatgctgtttgtacaacaacattcagtgtattgacattgcatttgacgcttaaacatgtgattcatcatccttcttacttttgataagaataatcataatttattcgatcacgattgtcaacaaaaatctattgtataattatagaaaaatatttggagaaatttttatggaaattataaaatatggtccttacactcttttcacacttattagaacaatcctaacatttatcgtggctattgagcatatcggtatctgtttcttagaaatgtttggtaaacctgaacaacaagctaaggcttttgacatggatatcaattttgttaaacaagaagctgctcaagtttcactagctaaccaaggcatctacaatggtatgttaggtgtaattttgatcattgctttctttattttccctatccctattctttttaacgtatggaaattaattctaagtttaattgtcgtagtagcaatttacggcggattcactgcaactaagaaaatctttttagtacaaatgctacccgcacttttagcattaatttttcttttcatttaaaaatattgcatttttgtagcaaaaaacataagaaaattcaaagctcctagtgataagctgtcaccttgtgattatgtaatatataatatcagtaaacatatagaacataataacgaggtggaattcatgagaaaattttttatcattatcagcagcattattactgggttacttattgggataattggggcaacgatctatctaaatagtcaatcgtcaaaggtaagtaactttaccattcgaactactaatttaacagctcaaccgaaaatgatcagctattctagcaataacctgccacagattaatctctcacaggattccgccgttcagaaattcaaatcattatatacacatgcagtaggtcaactaccttagactgaagtctagggtttagtggcttgttagcttgcgctaaccagaacaccaacttgcttagatacggatttgacttaccagcagtaatcttttgactattgccgatagaggtcgtctaattaccaaagccttttaagtccgcgagttgctagcggactgcagcttttctaggctgcttcttttattttaggattctgccacttgcctaatcctttttctaagatgttcacggccgcattccaatcacgaatatgatgcatctgacagattgggcaagtccattcccgatccttaagggttaatttcttataaccgttttggcccataatactgccacattgatggcatctttgggtggtgtacttaggatcaattgttagaaattctttgccatatagatatgccttataagccagcatgttcaggaaactacgccaaccaacatcagaaatagcttgagacaaggcatgattcttaagcaggtttttgctccttaattcctcggcaactactaaatcgtggtttttgattaatgcagttgagagaacttgtaagaagtcttcacgctgtctgcgaatcttgtcgtgcagtctggcaactgataagcgctgcttttgatagttttttgctagccgcaaattgcgtccttcttttttagcccggcgctgcctgcgagataatactcgttgagcacgagccagcttctttttggctttgcggtaaaagcgtggattagcgaccattgatccatttgaatccgttaagaaattatcaaggttgagatctattccaagttgactctgcgtcttaggcaaggctttaacaaaggcaatatcgctgcctaactgcattgataagtagaattgctcgtcagcggtcttttttatcgtcactgtcccaattctagttgagatatgattaagcaagcgctctttaatcagttttctaaaaccagcaatgcggacaacgcctagcttaggcaatttaatatgcttagcatcaataaacctagctgtcccgttatcaagaaaagcttctggctgcttaggatattgacagttggtctgatatgaccagtcgctgcgttttttatggaaagttgggattccatgaccaatcttacgatagttgttccaagccttctgataattttgaatggcattggcaagagcgaggctatcaatttctttaacacgcaaaaagctataagtatcgcggatattctttggcttagccaatagttcgctattagtgactacttcttctgccaacctagtctcataattattaagaatagaaaaggcaaaaggcattgcttgatattgtctaacagctaagtagcccttagcatgataattacttcgattacgtcctacataagagttgtagacaaagcgctgcgcatcatagtttagcttaatgattttcttttgcttagaactaggataaaagcgaagcttaacgccaaaatgataggctaaactgctcatttttttcatgtgtttcacctcctcgtattatataaattgtaattagtcatattgtgataattaatcaaattagtatttgctttttgatcttcacatgttagcctctaattgtcattggctttggtcaactggtctaggttatcacctcctgcagttttgtctgctttataagtctgccacccagacagttcctttatgctctaactcacatgctgtattgattgcttctttttgctagtccttgagcaattgggattaggtgcagctttcaaagaagcaaccagtgaatacttatactggcgagattgaacttaagaactgtaattaggggttaacatgtgaagatcaaaatctatgatcagaaatttgaaagaaaggaggccatttccaatgaaattatttgtcggtattgatgttagttctaaagatttacaggtcgttgcacttgattcagaagatcaaaacaaacgcttaattaacgatagctttgtcaatgatctttatggtgctagtgaactgaaaaaacaaattttagatctagctcaaaataaacactatgatcaaatcattattggcatggaagctacatctatttacagttttcatcctgcttactttttccaaaatgacgaagatttacaaaagctcaatgtagagactgatgtaattaaccccaaagaaaccagcaggtttcataaagtctttgaagaaagtaaaactgatcctctcgatgcttattacattgctttgtatctaagctttggacattatcgagtaagcattgccagacaagacaactatcttgctttagagcgtttaacgcgtaccagatatgaattagttcaagaactgactcgtaccaaacagcacttcattgaagctttatattatcgggttaataaactaatcactgtcgataaagataagattaatactcctcttttcggtgctacaatgatgtctattgtaaccgatagtaaaactctggatgagatcgcggatatgcctaccgaagacttaatttcttacttacaggttaaaggcagaggacgcttttccgatccagataccttggctaaagcaattaagaaagctgttagaggttcatatcgcttaggcaaagtaatgactgattcaattgatgcagtgctttctgttcattacaacatgattcaaagctttaatgaatctattaaagatctagaaaaagcaattgatcgtatcgttgatgcattaccagaaagcaaaattctggaatcaattcccggtattggcaaaacctatacagctggtattatcgctgagatcggaagtatcgatcgctttgataaagaagaacagctggctaagtatgccggcctaacctggaatcaatatcaatcgggagatcacagcaacgaacatactccaatggccaggactggaaacagatatctaagatattacttgattgaagctgccaatctagcaagattacatgatcctgttttcaaaaaatattaccaaaagaagtatgatgaagctgtctactcgccgcataaacgtgcttgcacattaactgcaagaaaattagtacgagttatctttaaattgctcaaagatgacaaactgtacaggacaccgaggtcttaatttcaaaaattggtctaaatttaaaagtaaacaaaagtttaacattaaaaaaatcaacctttaccaaggcttagtttcatatactcaaatttatgatcaaaaagaacaaatatcatcgcctttcatttgacttattaccacatgactcatagattagatatttatattttacagggaagtcgaacatatgtctctattttttaataaaaaagctgactgctaggtcagcttggtcctatccatccccacattaaaatacggggattttcgggcgtttttcattaaatcgatcacacttagtttaagtaaagatatctatgtttatgacatagtaggctatgatgaccgtaaagactgtactattcaagttgacgcaactaataacaagattctaggtcagtctacgcaggtgcttgattatgactacgaaaaagatgcgtctttgaacctaaaaaagacaatttcacgccaagaagctaatgaaattgccctaaaagaattcagtggaggaacaccgatttcatgggaattaactgatgacaataatcaatcaatttgggaagttaaaatgatccacggtaaacacaaacataccgtaaaaattaatgctagaacaaaggctgtaatctaaaataatccccaacttatgcacaagttgaggattattttcttatcttttatctaggttgactatctgcacgtgacttgtaatcaccgttttcagtaccaataattagcttttcgccattcttgataaaatcaggaacttgcacaactaagccagtttccatagtagcaggtttaccaccaccagctacagttgcacccttaatctctggttgtgtttccttaacggtcatttcaacagttgatggcaattcaataccgataatcttgttatcatctgtaaagtccatatcaaccataatgttaggcatcaagaacttaacgtcatcacccaattgatcagctgaaacttcatattgatcataagtatcagtatccatgaaagtataagtattaccttcgccgtaaaggtattgagcctttttcttagttacttcaactaaatccactttttcagttggacgcatggtcttgtggacaactgcaccactcttaacgtcacgcaaatccatttgcataacggtattacccttacctggcttatggtggttagcctttaaaactttgatcaatttgccatcttggctaaaaatcataccttttttcaaattaattgcttgtaccattatttcttctccctttaatttaaacttacctttcgactagtttaaacacgctggaggcaaagcaaatttttttatcaacagtaaataaatcgtattcataatacctagtataccaaattagatgtgccgcaggtatatccgatcaatcaaatgtccgtcagtcttatgcaaaatcaggctagcacgttccttggttggcgcaatatattcacgcaagttgaccagattaaccatctgccaggtttcttcagccaattgaattgcatcttccagcggtccattagccattttatagtaaaaattatctggcttatttttatttaatttaagtacttttctaaagcgttgcatgtaccatttttcaatcaaatcttcttcagcgtcaatataaattgaaaaatcgaaaaagtcactagtcacaacttgtccactctcgggcaattgcaatgtattaattccttcaataatcaatacatcaggattttttacatgaccatatttcccaggtactatatcgcttaattcttgagaatatagtggataaacgatatccttctttccacttaaaacgtctcgtaaaaaatcactgagcaaagtcatattgtaactttcaggaaagcctttgcgaggcattaaattacgccgctttaattcctcattagggtaaataaaaccatccgtggtcatcaagtgtacctttaattctggataggttctactgagcaacaattgtaataaacgcgcagtggttgatttgccaaccgcaaccgaacccgaaataccgatgataaacggagctggtgaaaaacttttatgcaaaaatttgatttgtgctttttgcgcattctttttttgttggtaaactaagtgtaagtaactgatcaaactggtatagatctcatgcacgtcggttaggtcaatcacgtctcctaaagacttgatatcagctaattcttctttggtaatattgactttatctaagggagctaatttagcccattcatttctgttaaaactcgtataatttctcatatatcgtatccatattccttctaaaacactaacttattataatagaaagcgctaaaaatatgaaaaaaataatcctattcggcgattccatttttaacggatatcgtaatggtcaaaatacaaacctagtaactaatttatttcaacaggcactaattaattatgcacaggtggaaaacatttctaaaagcggtgctaccacagttgaaggcgtcgattatttggagcaaatttccccagaacatgatctagttgttgttgaatacggcaataacgatgccgcaacagcttggggcattagtccagaaagctacgaaaagaacttggctcaaatccttagtgcagtaggcaaagccattgttgtgggattgtgcaatcccaatccagaaagtgacatttttcaatattatggtgctgaaagactcgatctttttaacaatatcgcccaaaaagtcgcaaaggcacatggtgcacaatttgtggatattttacctgcaatgagaaacttaaaagacaaatcgacatattatcaagccgacgggcaacatttaactgatcaaggaaatgagtttttagttaatcaaatcgtgccagtaatcaaaaaagacttagcctaagccaagtccctcttcatcatcacatgttctacgccgccttcatcaaacggttcgcctacaacttgatagcccaagctatcatagaaaggctttacccgcatttgggcgtgacagtaaactgcatcaatcttattttgccgtaaaaatttatgcacagctgtaatcattttcgatcctagctgttgtccgcgcgcttcttttgacacagcaacgcgtcctagcatccatttaccatcttcttgaaacagacgacaagtcgctaaggcagtcgtctgtttttgattgagtaaataaacctgaacagcaattaggtcctcatcatctaaatctggtagagttatcttctgttcagccacaaaagtcgtgttgcgcaatctttctacgcaatagaattctctagctgtcatttcatcaatctttttaaaagtaaaattatctatcttcatattacttgcctaaccaactattgtttctgccaaaccatttttcattaagtttacgcaattgaccatttttttgcaattttgctaaaccttgattgaccttctgacgcaaagttttgtctcccttacgcatccccacagcgaacaagtccattggcacgcgatcattctgaattaccttgtattcgctacttttagccatgtgagcaatataatagtcggcataaacttcatctaacagaattccttgaattcgtcctgcattcagatccaagaacgaattagaaatcgtatcatataaaactgttttcttagcatgcagcacatcttgtttagtttcataccactgctctgctgttgaaccagtttgcattcctaattcataattcttcatttgtttaaatgaactaatgtcactatcttttttcacaactaaaacctggcgattacgtaaatatggcttgctaaaagctacttttttctgtcgttctggcgtaatgctgtaaccattccagagtaagtctatcgtaccgttacgcagctctgtaacgttcattgaccaatcaatcgtttgaaaagaaaccttaatgccatattgtttaaagactgccttagctaagtcgatgtcataacccgtcaattggccgtttttcttttcaaagcccattggtacaaaactatcgtctaagccaattaccacttgctttttgctggcaatcttattccatgtatcttgagtattagcttctttttgtacgctttggcaaccagttaaacataatgttaaggccaagacgatacctaaaatccattttttcattgcctaatcctcgcttaacggtcgaaccttgagcatctgatccgccacattctctgcaaaattcaagtcgtgggtgataatcagctgggttaaacccgatttttttaagcttaaaatcattttctcaacttccttacgtaaatttggatctagcgcgctagttggctcatcataacaaagaatccgcggtttcatagccaaagctctagcgatagctactcgctgtttctgcccacctgataactcataaggatactgctgttcacggccacttatttgtagacgttttaacaatacacgcgcatcctgctctgcttcagttttactcttttttaataccaaagtaggtgccaaagtgatattttgtaaaacgctcaaattaggaaaaagattataatcttggaaaacaacgccaaccttgcctgaatcataaggtttaccgtcaatcaaaatttcaccagaatcttttgtttccaaaccggcaataattcttagtaaggtggttttccccgctcctgatggacctacaattgtcataatttctccgtctttcaaggtaaaagagatgtcacgcaaaattcggtgaccgttaaattctttgctcaaattttttacttctaacatattctcacctcaactacttgtaataagaaaagtatttttccagctttttcaaaacaaaagcacaaatactgatcaacagtagataaattacacctactaaaactaacggtactagcgttacgtctctggccattgccacattgccggccctaagcaaatcacctaaaccaatgacataaactagcgatgaatcctttaccaagttaattacttcatttccaattgaaggcaaaacaatttttattacctggggaataataatcttggtcatcgtttgccagcggctcaagcgcaaaactttcgctgcttcaaactggccttcatcaatcgattggaagccgccacgaaaaatttccgcaaaataagccgcataattcaaaacaaaagcaaacaaggctgcttgatagcggggaaagacgatatgaataattggtaagccataaaagacaaagatcaattgcaataataagggcgtgccccgcataatccaaacataaaagttaaccaaccagcgtaatggtttaaacttacttttttcacctaatgagaccaaaattcctaatggcgttgctaaaattaacgtccagaaaaaaatacttaacgtcatgcctgctcctgacaaaagagcgggtaaaatttctgcaatatattttaatgacatactctcaccttcatttttctttcctaataaaaaagccctcttaggattaacctaagaggacgactgctcgtgattccacctcatgttcgcacctgctcacgcagaaatgcctcactaggttgatcattttaaaagaaaaaccctcatagccaaacggctacgagggcgaatgtaatcgcggttccacctcatgtttacaaattgctcacgcaacttgcctcaataagttcaataatcaacctttagctataacgggctatcccggattttcctacttttgttcagaagaccaactcacagatgtgattcatactagcaaatatcttatttccaccagcaaagactctctattactttgactagtattactatttctgttctaagttgtttttaatgttgaataaatcttaaatgatctagcaacttttgtcaattatttttcttcataagtatctggatcaacatcaagcaatggactcttttctccagtataaataatatctagcttatacattgcacgagaggtaatagtataaacaagttgagtttcatccaatttatggtaagcagctttagaggcatcccacatgactaccgcatcaaattctagtcccttagccaagtaagaaggcacaactagagtaccatcaactagtcgctgattagcagtcgcaattaaggtcgtgttttcaccttttttagctaattcttcatgcacaaatttagctgcagctaagtctttggtaataacagctgtcgtacgcttattttgttcattattatgcaaaacgttaactaaaacatcaattgcttcatcatcgttttttctgccccaaattataggcttaggacctttacggttaaaggcttcaatcttttcgccttgacgcaaaatttgcttggtgaaattggtcaattccttagttgaacgatatgatttcgttaattgcaccacatcagttttttcaggatcaaataagccagagatctgcttaagtaagctacgactttcatccttagtaaaaatagcctgattcaagtcacccaacattgtaaacttggcccgtgggaaattatacttcaagtaagctaattgaaatggagtataatcttgaatttcgtcaatgaaggcataacgcatctcaaagtcagtcctgcgaccagtgatcatgtcatacaaatataagtaagctgaaacatcattcatggcaatatggtgctgcttaaagttattcttaacttcttccacatgagccaaccaatcattttcatcaatattccacttagatagatcaaccatcttaggtacagctcgcaaaaagctcaggtattgtgctcgcatattcaaaaagtggttgtgcaaaatacgcttatgcacgcccttcaaggctgataatacaatttttctacctaaaaaggcctcttccttagcctcagactcaaattcttgatcaggtcgatcatataactcatttaattcagattggctcattccttcaatagcgtgtgccacccaagccttcttagtttctggcgtaatctttcgattcaacatcttgatcaattcttcacgcgttgcatcaattcggttggccaacttgtaattttcattgaaagaataatagatctccttaattttttccttatcaaagtaaggtttcttcttatcacggaaataaatattcttaaaaataacaccgcgcttattcaagtgctctgcataacgagtcaacaagttaaagaaattaactgaatccttaaacttagaaatattgctgtctgcggtttgatcttcaaactgtctgaataagttttcaacttccatacctggcaaccgtcgcgcaacaaactgccagtaagtcatttgaaccatattttgttcgcccatttcaggcaaaacattcttaatatagtcattaaacaactggttaggactgaacatgattacatcacttgaagtcaggttgccacgataacgataaagcaaaaaggctatccgctgcaaaatcgcactggttttaccagaacctgccgcaccctggacaaaaagcagatctgctttggtgtttcgaataatcttattttgttcgcgttgaatcgtcgttacgattgacttcatctgcgttgatgatttttctgacaaaacttccaagagcatttgatcaccgattgactcatcagtgtcaaacatgttcacaatcttgccatcttcaatcataaattggcgtttcttagtcatatcaactgtaatttcaccttcaggcgaattataagaaactttacccaatttaccatcataataaattgaagatattggtgcccgccagtcatagatcaagaagtgatcgtccttgtctgcaaaagaacctagaccaatataaatcgtctctgttcggtcctcatttttttctttaaaatcaacccgagcaaaatatggtcgcttctctaaacgctctacagtctctagctgcttagctgaatgttgccaagcatgttcacgttcactcaataattgttgctgctggtggattgacagtgctgtttccattgaagtggaataaccatcataatccaatttaacatcgtcaaaaaagtgtgaattaagctctcttgcttcgccttcagctgatttgatagatttttttaaagttttttcgcggtccttgatctgacccataatattatcaaggtgcttttgttcaagttctttttcgtttttttcagttttggctgtagccatctaatcaccttttctttaaaaattcgcataccattttaccatgaatagcgctttcataatagttttcctgctcgtgagaaaaatataaataaaaattgatgaaaactttaactttagagactataatcttgacatattggggtgatatatacatgaaaagattttttaaattactgagaaatgttctcttgcttgctcttatcgctcttggcgtttggacttatcagaacaatcccaatattcgtatcgcaacgcaagactccctagctacacttagctatcgaattaacgaacttctaactaacgaaacgaccatttctcccaataacgaaaaaaagactactaatatcaaaactgacacagataaaacagaaaatgacgattcttcagacaatcgtgtatggtcaaatcctgaagctaaggtttatatcgatattagcaataatgctcaactaagatcagctgcagtcaatgcaatgaacgcttggaatcgtaccggtgcttttacttttcaccaaataaatgataaaaaagacgctcaaatcgtcattaatacagtcgataatagcgacactaatgccgcaggagaaacagcaactacctataaccctgctacaggacatttgttaaaggccacggtcaacttgaaccgttactatttgcaaaacgaatggtatggttacagttacaatcgaatcgttaatactgctgaacacgaattaggccacgcaattggcttaaaccacactaataatgtctcagtcatgtacccaaagggttcgatctatacgattcaaccgcaagatattaaaactgttaaaaagatctaccacgaaaataattaactttaaaagctcacctcttttttctacaataaagtgtgagctttttacgaggagaaaaatatgaaaagaatttatatcgtccgtcacggtcaaacttatatcaatcgctacaataagatgcaaggttggtgtgacacaccattaactacaccaggaattgaaggcgctgaagaagctggtaaagctttaagcgaagtaccttttgacattgcattgtctagtgatcttaagagagcaagtgatacctgtgagatcatcatgaaatataacgccaacaaagacgaattgcagcacatcgctagtccatttttcagagaacaattctacggctacttcgaaggaatggattccgaaatggcttggcgaatgattggtggcagtcacggctacggaacacggcaagaaatgtttgctcatgagagcatcgatactattaaggattggattaaagaagccgatccttatcaccaagcagaaaacgctgaagaatattgggctcgtcttgatgatggttttaaattaatcagtcaattggatggcgctgaaaacattctgctagttactcacggcttcactattagaagtctctggtatcgttatggtgaccatattcctttggttccaggtcctaagaatgcttcaatcactattatgacaatgagtgagaaaggcgaaattaagatacctaagtggaatttaatgcatttatagcaaaataagattaggcgaatcgggcctaatcttattttgtttgtttcccggatttaaaattgaagtgcaacactaagtgttaaacaaaaaggccatgaagacctaaacttgaagtgacgaaaaatcaagaaaggaagatctttatgaccaattcaaattctagcatttctaagcactatcatcaattaaccagcgtacaacgtggacaaattcaagcaatgctggattccggcataacttcccgtactgttatcgctcaagaagtcggctgccataagtcgacaatcagtcgcgaaatcaaacgcggaagtgtcctgcaaagagacagcagctatttattgtatgagcactattacgctgatactgcacagatttattatgagaagcgtcgcaaaaactgctatcagcgcaatccattgaagcattatgctgtctttttgagaatgctctccagacgctttaaagctaaatttgatgccaccagcatcgatgagttcgttggtgaattcaaaaggactatgccaggctacccttgtcccagcacaccaaccgtctatcgctatattgatcagggcttgctggacataagcaatattgatctgcctatgaagctcaaaagacgcaggaacaagcgtcatcacagccatggcggtcacgctttgcacaagaagcatcttggcaattccattgaacagcgtcctaaggaggttgaagacagaaaagctccgctgcactgggaaggagatctggttaaaggcgtcagacgcaagaatcagcctgctttaatgactttgactgaaagaaccacacgctttgaagtagttatcaagattcctgactatcgggcaagcacatgccaaaggctgcttcaaaaggagattgacagacatcctgcctggtttaaatcaatcacgtttgacaatggctctgagtttgcggatatgaccaagatcaagggctgccagatttactttgctcacccatattctccatgggaaaggggcaccaatgagaactgcaatggtcttttgcgtcaattcttccctaagggcaagagcatgaaagacaagtcaaaagcttatgttcaacaggcaactgatgccattaaccgcaaacatcgtcgaatccttcaatatcacacagcagaagaactcttcaagcaatatatttcctcatagcctaactgttgcacttaatttgacaattcaggattttgtttgtttaattatttttgcaaaacaatatttttatatagcttcactgttattaaaaaacttcctgaaactgtcaaatcttttgtgtaaatagttctttctcgtaaattgattttttaattatttatttaatcaaagtaggattctaaggtgtcctgaacctgaccaaagcctttatgaattcgattgaaataacggtcattgtagctcattgcctgaataccaataaaagcatcaagcgactgttcagttggaaactctgccttaggcttagctttgcgcttgatcacattgttaaatgattcaatcatgttagtcgaataaattgaagctctgatctgcttgggatagttataaaagaccagcagatctggttctatgtctttcaagcttctgataacatggctgtaaaccttgccccatttggtatagaagtcatgcaggacagctgtggcttcttctttgtttgtctgttgatgcacctgtttgaattcgttcatgatcttttcacgatcgtcgacgcgtactttagcgcagatattgcgcatgacatgaaccaaacagcgttgaaaatgagctttaggataagtcctggccaaggctgttttcatgccaacaacaccatcagaaagaaagagttcaacttgcttcaagcctctggacttcatgttttgaagcatctctgtccagacttcaatgttctcactaggagcaatgcagtagtcaatgacttccttatgtccattaggtttaatgccaatggcaatatagactgcttcacgctcaacgctcaaacgtttctcggcgcaaaggaaggtatgtcgcatccaaatagacgcagaaaaacttgtcgcttagcttgcgtttgtggtaagcctcaacctttggaatcatctgcttggaaatatttgatacctgagctggactgtaatggctgccatacatcttttcaattagatcggctatttccctggtggtcacgcccttggagtaaagcttgataatcatgctttccaagatatccgagtgctgcttgtagtcaggcagcgtgtgctgatgaaattgaccgttgcgatcccgaggcacttgcacttcaattgggccaaattgcgtatcaactttgcggaaataagcaccatttctagagttgccagtattccagccatttctggcatagggatcatagcccagaaaggcagtcaattcagcttctagcaagttattaacagcctgttgtagttctttgcgcaataaatcatttattttgtctggattgaatagagcttgagcaaaatctttggtaaaatcattcatgaaggagttcttctttctgtatgtgtttttttgttcaaaccaatcatacgagaaaggaactcctttttctaatgtttaaagaaataaatttaaggaatcattcatccttacacaaactattttacagtctcaacttcctactatttttaacagtaggaagtcttactctaactaatctttagtcacttgttttagtttttattaacttacagtcgcccaaagtctgaatcaattgtttgccatctttttggtggaaaacagcgttttgatacgacaatcgttctttctttttactcttatctttatactttttaataaaggttacttcatagttaatccgactataattacgcttacctggtaaaacagagagcaccttgatctttacacttaatttcttgatactcttctttttatgccattcctttagttgcttagcaatcttcttatagtctgcattttcttttccattttcaaagtcatctgcatttggcgacttaagggtgttgtacaatagcttagctgcatccccaaccttaatcaagccaggccaaatcgggttaacaatatagtcaccttctgcatcctgatagacatctttttcgccattgccttgatattcagcagtaccatcataatcagtgacgtcatcctcactattagaaaattctgaactaatcgactgcgacaaatccgttaccctttcggacttaatagtttgaccatctgccttactcttaatatagatttccattcgcttagcaatcggataatccttgaaagtatagctaccatgctggttcaatttacccgccttacgatcattgatatagatcgtaccattaggaacgctgcgcacttggaaagtggccgttttgatcttcatatcaacagtcttatctgaccaaatgttaacaatcgaatcagcatctaaatggcgaccattaaccttagatttaactaatatatgatagcgaccaggaaagaccatacctaaatcttgatagtaattctgattgccaccttccatttcaccataatccttttggttaaccgtcaaagttgaattagcgtgattggtcttcacctgtgggcgatatacttgtatccacaacttatattttggaaaaagcaaaaaattgcgtccatcttgaatcagtctgatttcaccatgatcgcgattatgacgcaaattataggctaaacgtttagctgcactgtgatgctctttaaagtaattttgaagcggcttcagcgatttatctgtcacatccatatcaggcgttgaagccgtgacatactgagctagctcagttttaggatcctgcattttagctacaatgcggtcaatttgacgttctttagtgtaataaaaattgccaattagccatgcaataccaattaacaggataataactcccgatatccaaattttcttatgttttttcattgatcaaaacaccttttcacaaatccttttaacttagattaacaagttgatcaaaaaaagcaaacatcttttgttcacaaatcaagacgaagttcttattatatttagtagcattattttattttggaggggattgcacagtggaagtaaattttgattttgtaaaaaatagcagcttcaaggaagcctttcctaccgctgaaaaaatccacaaattatacacaattgatgattatcgtgacgttatttcaaattcacgtcttctattagagagtctaatcaaaaaaatttttaagttagaaaatctcagtccatattacacagttcatgatggcgaacaccgtaatttgcgtaataatacacattatttacgcaatgaactagattaccctctttcgatcatggatttatttgacgaaatacgctgcatgggcaacgctgctgtccacgataaccaaattgaaccagatcaaaagcaagcctggcactgtatttgtgatttacacgatattcttgtctttttaattaacagctatgacggtcaagacctatattatttgcgtcccgatattgcgatggaagcacaaactgatgaagaccattattatgtgcgccaaaataagcaaccaaaaataatgaaattgcatgatcatcaaaatactaagaaaaaacagtccgcatctgcaccaaaaaaggcgaaacatgttaaacatttttccagtaaacagcatatagagcaaactaactctgagtcacaaacgaaaactactccttccactaaagacaattggttaagaaaaattaaagaactctttcaccatgattagtcatattgacactatgtcacaatatgataaactatatattatataatttacataccgagaagcgcctatgacgctgccgatacgcaaatgaaaactgaacaagtttctcaaatggggaacggcttatgctagtaggtcgttttccattatttttttacgaaaggagtggttagtccgctatggataatcacaggcaaaaaccttgggctgtcgaacagtctgaggtattaacaaatacaaaaacaaccgaaactggtttaactgaagacgaagttcgaatacgccagcaagctggtttaaacgagctcgcagctaaacctcttaaaacagtaatccaaatggtcaaagagcagatttttgatccaatgatcggtatcttattagtagctgccctcttatctgctatgtttggcgaatataccgaagccattattatcgcgacaatcgtggttcttaataccattattggagtagttcaggaaaagaaggcacagtcttctttagctgcgttatgtgacatatctgcgccaactgcccatgtaattcgtaatggcaaagaattaatcataccggccaaggaattagtagttggtgatattgttaccttgcatgatggggacatggttccagccgattttcgcttaattgaaacagctaacttgaaaattcaagaagcatcccttactggtgaatcagtaccggtagaaaaagacgcagctgctgttttaaattcagattgtgctcttggtgaccgcatcaatatggctttttcttcctcaattgtgacttatggtcgtggtcaaggcgtcgtgacagcaattgggatgcaaacagaaatgggtgccattgctggcatgttagaagatcaaactgaagtacaaacaccattgaaacgcaaattagctaaagccggcatggtcttaacgactatcggcttaattatttgtagtttggtctttgcaattggtgctttctatggccgtccacttttaccacaattcttggttgctatctcattggcaatttcaattattccagaaggtctgccagcaaccgcgacaattgttatggccttaggcgttaaacgcatggttaagcgtaacgctttgatcaaaaagctgccagcagtcgaaaccttaggtaacgccactgtcatctgttccgacaaaactggtactttaaccttaaacaaaatgactgttacacaggcagcaacgaatgacttcagccaaagtcacgtagttgaccagcttgcagcaaacaaaaccaatcaaactttggcctatgctagcgctctttgtaacgatgccagcttgaacggtgaaaaagagattggtgatccaactgaggtagccttaattccttttgcccaaaagcttggctttaaccaatctaacttaaagaaagaattcccccgtttgttcgaacaaccctttgattcggacagaaaacggatgacaacattgcacaaaattgacggtcaattaacggtcttcactaagggtgcaacggacgaaatgttgccgttatgtacacacattatgactgacaatggcgtgcgtaaaattacaccccaagacaaaaagcaaattgcccacttgtctcaccaaatgcaagctgacgctttacgagtactaggctttgctaccaaaatagtggataacttacctgaagcaaatgctgatttggaaaataatttgacttttatcgggattgtcggcatgattgacccaccacgaaaagaagttgcagcatcagttaaaacctgccgtgaagccggtattcgcacaattatgattaccggtgaccacaaggtaactgccttggcaattgcgaaaaagttaaacatttatcagacaggtgacttagcaatctcgggaactgaattagaccaaatgtctgatgcagaattagatcaagctgttgaaaaggctaccgtttttgctcgcgtttctcctgctgacaaactgcgcatcattcaaagcttaaagcgaaattgtgaggtaacagctatgaccggtgacggagtaaacgattcacctgccttaaaggctgccgatatcggtgtcgctatgggtgtaacgggtacagacgtggctaaggacgtggctgatatgattttgcttgatgatagttttaccacaattgcgcacgctatcaaggaaggtcgccgcgtttaccgcaacatccaaaaagtaattcagttcttgctagttggtaacattgctgaaattaccactttgtttgcggcaactatttttaactgggatgcgccattattggcagtacacatcttgtgggttaacttagctacagctactctacctgcccttgctcttggcgtagacccagcaagtaaaaacattatgaaacacaagccagttaaagctggtactttattcgaaaaagacctagttattcgggttattacccaaggaatatttgttgccctgcttactttaactggttacttcattggtaaagaaaccggcaatcaagttgtcggacaaaccatggccttcagtattttagcattggcccaaatgattcgttcatttaaccagcattcaaatactgatcccatctggaaaagatcatctggtaataatccatggttaacagtgtcattcattatctctgcatttttcatgggtattattctctttgtcccagcaatgcaagatgcatttcacattaccagtttgtcagctggacaatggttaatcgtagttaccctagctttactttcaattgcacaagttgagttagtaaaaggttgggcaaagtttagaaatatttttattaatgacaataatttaattgaagattaattagttacaaaaagacggtagtacaacactatcgtcttttttgatattaaactttggctgctgccaattggtcaacatctatctgactacgaccaatctgaattgccttttcggtactttcattcaagctagcattgatcatcttatggctaagctccagcaccattggcaaattaacaccgctaattacccgtactcgctcaggatacatatcttcatattccgaagcgactaagtggggtgtcccattttttaaatcagttagcaccaaaatctgactattctgatatttattcatgactttagcaaaacgagccttaaaatctctgattcctgtgtcgtttaattcaattgtcaggatctgatcattcttgcctgccaacatatcatgtgcagacattagccccgcagccaacccttcatgagttgcaattaaaagttccataaaacgcacctctttgtaagcgatttctatagaaccattttaacatatttttgtattaattaagctgttcaatatctgctaataagctactttgttcaggtgttagccgctcatccttttgccgtaacttaagtacttgtagacaagtgtgcaaaatcttttttccttgttccgtcacttgtttgccatccatatcaggcgttacactggctaaaaagtcatccatctcatcagcagtaaccttgaaaacatcattttctccatgaatcaagggcatccgattgagcatttcttcaatcatttgtaatttatttctagcttcttcaaaatctatcttgttcacatccaattctttttcttttattatacaaaaaaacagccacctaagtgactgtcatctttatttcgtattaataattgcgtttgaaattgtagttgcattagattcgatcagttgatgtgaattattaataaaaagggaagccccaattcctatagcagcaaatacaagccaaactttctgtaaaactgtactcttcatgttcccagctccttatatttcttattatataaaaagccgatcgttatggggatggctacgcttacaattaacataattgtaatattatttacctttacttaagagttacttctccagcaacatttgtatcaaaaaagtcagcaatttgatggacgtccatcccttgccctaaagcccacattaatttggtaatcgcactctcagaagtcatatcacaagcagaaatagctccttccagtaaagcctcacgccccacctcatatttggtcaaatcgctacgttcatacaagcattgactgctggctacaacgggaataccttgacgaattagcataccaattgcggctaccatgttgcggcgaataaagttcatcccgcctagaccatatgcttcaataacaattccacggcaaccactattaaccatcgcaaaaagcagattaggatcaaagcctggaaatagtttcaccaacgatacgtgtgaattaattttggtattcaaggttggctgaccgtcatgttctctttgaaaatgttctgaattaaaaactaatccatcggaagaaacggttgctactggtggcacattcacactttcaaaagcatcaaagttggtagtccgcacctttacactgcggcagcccagcataactttattatgaaaggctaaataaacatcaggtggacaagttgctgcagctgcaaaagccaaccgtaggttatcgtgagcgtcacttaggaccacgttaattggtacctgacttcccgtcagcacaaccgggatattaatatttttcagcataaacgacaacattgatgccgtataagccatagtatcagtaccgtgtgaaacaacaattccatcgtaatcattgcggtatttgtagatattttctgcaataaatttccattcttctggttggatattagaagaatctaattgcaaaatatcgcggacttgaatgtcgtacggcaactttcccaacattttaattaactcttcaccggtttccttgggtactaggcctgcatcagaagcaacggaagcaatagttcccccagttgatagcaataatattttcttcatcttgttcccctttatctcaaatcacaatgtcgaccataactattcatgattagatcaattaaaacataggccgaactaaaagttaccgcattttgcttactaaattgaaatggcgtagttttgaagaaaaagctatagtcgctaagagaggctaattttcccgtttgccagctagtcagtgacaccaatttcagttcagtattcacgacatcaatcttcttaagttcttcaataattgttttattaaaaccaccaaatgaaataacaaacagcatgtcattttcccgtgcagaccgccctaataatgccacttcgtcgcgtgcactaggcaaaataattgcttttttaccaattaagaaaaagttatgcgccaaatattccgcgataatttgctgctgccagccagtagagtaaagatagatcgtttccgcttgatctaaatccgcaaaaaatggttgtaagtttaatcccttaaaatatttaaaagtttcagcaatgatcttttgtaaatccgtattgaaatctagcgtttgcttgttcttaacgttttgctcctttcgtgtagctaactcggacaattcaaatttcaattcgctgaaaccgcttaatcccaattttttgcttaggcgaaaaatagcggacttagaaacgtataatttctgagctaattccagcaaactcaactgacttgctacttcaggatatttcaataaatagctaacgatcgctttatcggtctcattaaaactttcctttttcttcatgaccgctgtttctaaatccattctgtttcctttctcatcactgtttcttattaagaaaagaatatcatgtcgtactcaaaaaaggtagccaccctatttgagtaactaccttaatttttattcttgaattgaagttatgttatgacaattaattatttaagttctggccagtatggagcattaactggaatcatgtcatccaaaatcttcttagcaacggaagcatctggtacagtcttgtttaatgcaaatgcttgcagcatcttattgtatgaatgttcaacataagcatcaacaaccaatttttcacaagtttgttgttccatcatcaagcctctttggaagcgacctgctttacccgtagccattggttgaatgccatcagcaccaaacaatgctggtacttcaacaattgaatctggatccatattagaaattgcaccgttattagcacagttagctaagaacttttcatgagtgttaaatgcgatcgcatgacaaatatctacgatatattcagagtgcaaacctgaaatatcccaaatattattcttagcagttcccacctttacgattctttcacattcgccaaagacaatcttttgccggtgttcacgaatttcatcagtacgagtatgcttcggatcagcattagcaacttcatattgtgggaagtagtagtattgcatgtaattgtttggcaaagtttctggctctagcttatattcatcggcaactttcttaaaggtggcttcccaagaagcttcagtatccttgtcgtaatcgccacctacccaatagccgtgctctttgacatattccttcaacttaggcattaagtcttcgccagtcttcttgttgcgaacttctttccaccagccaaaatgattcaaaccataatagttaaagtcaatatcatgccaactgtccaaaccacaaatggcagccattctgtccatatcatcaatcggcatatcacaaatgttaattaccttagcatttggacgaagacgacggcaagcttctgcaacgattgcaattgtgttggagtagttgatcatccaagcatttggtgagtattcttccatccaatcaataatttgcaaaattgcgggaattgagcgaagaccataggccattcctccgggtccagtagtttcttgaccattcacgccatattttaatggaatcttttcatccaagcttctcatgtgatatttaccaacacgaattgatcccataacaaaatctacatcagtaaaggcctctttaggatcagttgtgtaagaaaacttaatttgaggtgctctttccttcatgataatttcaacagctttggcaatcttttcttgccgttcagcatcgttatcatagaacttcaactgtcttaatgggaatttatcctgactcttgattaaatcaaggacaaatcctggagtaaaagtactaccaccgccagcaataactactgaatatttcttaccatccataatctattttctcctttaaataaaactaagtttttatctctgtttcatttgccttacgcatatatttatatcatcttctcccacaaatgtattcgttttcaccagcttcagactttgtttcaagttttggaacgcgtttcactacgcgaaatatttttaaattttgccttaagcctaacaaatcaggtgtttaacttgcctttattagtaatagtgtaaaaatgaaaaaaataatcgtttcatgaccaagataaactataatttgaacattcctttaaccacaaaaataaatagtccgtatttgatgatcgtatagttttaatgaaactgtcaaatcttttgtgtaaatagatctttctcgtaaattgattttttaattatttatttaatcaaagtaggattctaaggtgtcctgaacctgaccaaagcctttatgaattcgattgaaataacggtcattgtagctcattgcctgaatgccaataaaagcatcaagcgactgttcagttggaaactctgccttaggcttagctttgcgcttgatcacattgttaaatgattcaatcatgttagtcgaataaattgaagctctgatctgcttgggatagttataaaagaccagcagatctggttctatgtctttcaagcttctgataacatggctgtaaaccttgccccatttggtatagaagtcatgcaggacagctgtggcttcttctttgtttgtctgttgatgcacctgtttgaattcgttcatgatcttttcacgatcgtcgacgcgtactttagcgcagatattgcgcatgacatgaaccaaacagcgttgaaaatgagctttaggataagtcctggccaaggctgttttcatgccaacaacaccatcagaaagaaaaagctcaacttgctttaagcctcgggatttcatgttttgaagcatatctgtccagacttcaatgttctcgctaggtgcaatgcagtagtcaatgacctccttgtgcccattaggcttgatgccaatggcaatatagactgcttcacgctcaaatgtttctcggcgcaaaggaaggtatgtcgcatccaaatagacgcagaaaaacttgtcgcttagcttgcgtttgtggtaagcctcaacctttggaatcatctgcttggaaatatttgatacctgggctggactgtaatggctgccatacatcttttcaattagatcggctatttccctggtggtcacgcccttggagtaaagcttgataatcatgctttccaagatatccgagtgctgcttgtagtcaggcagcgtgtgatgatgaaattgaccgttgcgatcccgaggcacttgcacttcaattgggccaaattgcgtatgaactttgcggaaataagcaccatttctagagttgccagtattccagccatttctggcatagggatcatagcccagaaaggcagtcaattcagcttctaacaagttattaacagcctgttgtagctctttgcgcaataaatcatttattttgtctggattgaatagagcttgagcaaaatctttggtaaaatcattcatgaaggagttcttctttctgtatgtgtttttttgttcaaaccaattatacgagaaaggaactcctttttctaatgtttaaagaaataaatttaaggaatcattcatccttacacaaactattttacagtctcaacatcatatttgcccatgaaaaccacggtcgagtaaaatcactaggatcattaggattaaaactctcatgaatcatattgctaccattggttgtgttagccattaaatacaataaattctgtttttctgctttagtctcttgggttaaccctactaatgccatacctattggccagatatttcctttaggagtatgcggacttccttgaccactccaatattcaccaatatagaaatatggattatctggagacaaaatgaatcttcttgtgttttgataaatgtcatcagtaggtttaacgtaaccaatataaggagcagacattaagctaggaacattactatcatccatcagcacatagttgcctctaccatctacttcataggcatattgctttttaccattgtgctcaacaataccatacctttgaattccttcattaatttcattttgcagtgttttagcctttgcaactatatctgaatcatccaaaatacttgaaaatatttcttgaatataatttaaaactactacggcaaacatgtttgaaggtatccagtatccatatgtacatgcgtcatcactcggtctaaatccagaccaattcattcctgtatatgccacaggcgttcctttacctttattctttaaagtatcagttggaacatcacagtccctttcaaaggtgtagttagaattctcatgatgttgctcagttttaatagttgccagcatctttttaattccagaaacaaaatttgcatcaaattgagctgtttcacctgtgttcttatacagtagatatgccagctgtactggataacagagtgaatctaattcatattttctctcccaaatccagggacccatttttgctttatctgtttgatgaccttgattattggcagtcatattaaatgcattagcataaggatctaagttcatattaaaaaattgccgttttactactcgagtaataatatccttaatgttatcgtcagttttagctaacaataaatatggtcttaattgtgcagatgaatctctttgccacattgccggaatatcaccggttaatacaaagatatttttattttcatcgacctttaaagcattctgcaaagtatctaagaaagtcttgttaaaaattgtatataaacgttcatctttagtgccacattctgcttccacttcattcatataattctttacttgttcatcaataatgtctttcattattttcacccccagccaaattataaaacgcttttataattaaaaagaagacattacttttcaccttattgtggaaaacaaataagccattgcctgtatttttacaaagcaatggcttattcattattaaacggttattcctcacccggtgcagatataactattctcattttaccagtgaaagtgaaattcttcatctcatttggaataattaaattagttccgatcttcaaatcatatgatttgccatcggcttctaattttccttcacctttaataactgaaactaaaagatatggatgatcctttaagccggtcttccatgtaccatcgaggtcaatttgccataagtagaagtgtggtgaaacaggtggttcaactaaagtcttgatttctgcatcttgatccttattagtcttaacatctagcttaggatcaacatgtggcacagttgtaacatcaattgacttttgcgtatgaagttcacgctttttgccgtctttaccaacacgatcataatcgtacaaacggtaagtaacatcacttgattgctgagtctcaataactaaacagcctttagtcaaagcgtggatagtacctgcaggtacgtagaaaaagtcgccagctttaactggaacctttctaagtaatttgtcccattcgcccttatgaatcatttcagccaattcttcacgatttttagcatggtgaccataaataatgtaagcacctggatcagcttgcatgacgtaccaactttcggttttaccagaatcattttctaccttacgggcataatcatcatctgggtgaacttgaactgaaagattatcattagcatctaagaattttactaataacggaaattctttagccttaggattaccaaaaagttcaggatgctttaagtaaacatctcttaaagacatccccttgagtggaccctctgttacaatagaagcatcgtccttgtagccggaaatgatccaagcctcaccgacttttccatctggaatatcataattgaaaatatcttttaatttacgtccgccccaaatttttggtctaaaatacgggatcaaaaataatggttccatttaaaatcacctcatttttactttagctcatttaaaatcatctagaaaggtatggcttttctttcttttgaagaaaaaagatacacttacgaccacatatttcaagttggtttggatctataaaaagatataaattttataatatcagtcggttataaccaattaattatttatgtaattaggatcttatttcgtgaaaccgtaaaatagtttgtgtaaggatgaatgattccttaaatttatttctttaaacattagaaaaaggagttcctttctcgtatgattggtttgaacaaaaaaacacatacagaaagaagaactccttcatgaatgattttaccaaagattttgctcaagctctattcaatccagacaaaataaatgatttattgcgcaaagagctacaacaggctgttaataacttgttagaagctgaattgactacctttctgggctatgatccctatgccagaaatggctggaatactggcaattctagaaatggtgcttatttccgcaaggttgatacccagtttgggccaattgaagtgcaagtgcctcgagaccgcaatggacagtttcatcagcacacgctgcctgactacaagcggcactcggatatcttggaaagcatgattatcaagctatattccaaaggcgtaaccaccagagaaatagccgacttgagtgaaaagatgtatggcagtcattatagtccagcccaagtatcaaatatttccaagcagatgttccccaaggttgaggcttatcacaagcgcaagctaagcgacaagtttttctgtgtctatttggatgcgacataccttcctttgcgccgagaaacgtttgagcgtgaagcagtatatattgccattggcattaaacctaatggacataaagaagtcattgactactgcattgcgcttagtgagaacattgaagtctggacagagatgcttcaaaacatgaggttcagaggcttgatggaaattgagtccgatctgctggtcttctataattatcccaaacaaatcagagcttcaatttattcaaccagcatgattaaatcctttaacaacgtcatcaagcgtaaagctaagcctaaagcagagtttccaactgaacagtcgcttgatgcatttattggtatccaggcaatgagctacaatgaccgctatttcaaccgaattcataaaggctttggtcaggttcaggataccttagaatcctattttgattaaataaataattaaaaaatcaatttgcgagaaagaactatttacacaaaagatttgacagtttcataaattatctatcactagttactacttataagactaacatcttacttaatcaaactttaaacaaaaaaataagaggtgaactacaacatcgtcacgttatagttcatctcctactttaagttgtttgacaaagagtcacattagctagtctctgtctcttactacatacattaatagttaagaagtggaaattaattaccaaagcacctctatttcaatgaacctgggaatctaaattcatatgaactaatcgggcctactatatcaagactagttatttgtttgactaattcttgaaataaaattattgcgttattaacaccataattgtttactattttttggattttttctggacttttaactttttttggattctcaatatcataaaaataatccactttaatatttaaagtcctatattcagaatcattatcattttcttcatttgagcaattggcatgccccgataatgtcacaattgcatcgtttgcagaaatagccacagaaatatcatcaaacataaattccaaatagaaactgtcttgttgctgttctagttcacctttgtattcataattaagtttattaattataaatccattatatttaagctgtactgacatcgttatctcctatttctttaccatttgtggttgaaaaactgatttttttattcccacctgatagaaagacagtgtcttttgtttattagagctttcgtttatcttcatctttgctattactttagaagttttatgctgtaatgttttattatctatttcttttatttttattcgttttcttgaaaaactagataacttatttaaaacttgctgatatttttcttcactactttctaaatcaatttcctgctcaacttctgtatacgtgcttaaactcaaacccgttaattttgctgcttcatctctatttaaattcaaactaattctttttccgaaaatcttttgtgataactggaattgatatgaatttaatctactattatttggattgattttattgaacttcatgtctttcgtttctccttcctataaaattcttttccctattattcaccaattgattatgaattagttcagccagtttcccaagttgatcagtaagtaaattcatttttcttatttttctttgatctttagtaggaaatttagtaaatccatatgtccagacaaaatatactttactctcatttaatgtaaataaaattctacagtttttccttacgccttcatttgtttcagaaagaaagcgaatctcatatacatgattttgtgacatcaattttttaacaatctcgtacttgatatatctgttagaatttggaactttatactcatccttaaaagaatatccaataataatcccttcttttacttcgggctttaattgttcaatattaccactactatctaaagtaacatttgaaagaaagttgataattcttaacaccgattcttgaatattaggattaagattatattcatcttctaaatattcttcggctaatttttgctcagacaagttatcatttatcaaatagaactggcgcatgggtcactctcctttgtctaaacattttacgtcaaaatcatgatattttccattctttgttgaactacagtaagtgttaatgtttttgcgatagactatcagccatagtctaaccttattctttagcttcatcaattatatcagcatccccaacctcagcacaaaagaaaaccgactccataatattccctgtcaatagctttttattccatcaaaaaaggaggacatagttctctttgataaaaaatctattccactaaatattttataaataaaggtgatttctatgtcctctcttaatcattgtattaaatcgagcttgacattaaagatgaaaatatcgtttttaaagcttgtttgaattaacaaacaataatgtcttaaaagataccacgccaaaataaaagcgaccttcgttcataagagcaaagaccgcaaacttgttaattgtctcaccacagaaattaacactcaaattctaaccttacattgcactaaaaatcaatacaactctacgccttctcaagcaaactatggtcaatcggttcgcccttcaaatgcgcgccgcgaatcgttttcgcaatcattgacttgcgcttgctcttcttatcgtaaacccagtcgccttgagctgtggcgatattctcaactttggtagtatcaccatcaattcttactaagaatgctggtgccattgttgagcgcttgttaggacctgaagcaaaaccacggttggtcatgtatgaagttactaatacttctttcttgtttcctttaattggaacagcatagtatgaataagttgaagttctccagttaaatggaacactagctaccaagacagctgcgtcgccattaagtggtttataaccataagttaagtggtctgaaacccagccgagcatggcaacattgtcaccgactttggcatctgcttgctgccacaaatcatcaccagtaccacggttcaagcgagttgtagcaaataaatggtacttgccgttcattggaataatgtttggacgttcaatttcatcagataccatcaagctgttaactaatgatggcaaaacttcagcaactttaggattattctcattcttggtaaggcgaatgataccaatagtagcgttagcccatgttgcacgactcctcatgtcgtcattagcagtcacctttaagaagttttgcaaagcttccttgggtgtaccaccataatttttccaattatagacctgattttctccttggtaattattactaccagttgaagcttcaaaaatcaggtaacgctgaccaccaacagaaatcacatgcgcatcacgcatagcaacgttatctgcacctttgttggtagacttccattgcttgtatgtctgatagtgataaccatcaccttcgaataaaacatggcggtgacttctcttagctatcgaaattgtgtttttcttcttgttaaccttcagcttcaagttaactgttgcaatcttttggtgattagtattttcacgggtgtctacatcagcgtagaacaattgaatactgccatctttgtttaccgtagctgagcctgaccattcttgatcagttggcttagcattaaaaccaaagattggaccagcacatttccaatggttaagattattgtcattgtacttgttatagagcaaataaatgtgggcatcattttgctgaggaatccccatcatggcgatcattaattgatagcctttatagttaacaactctaccagtcttagcatcttgtactggccatgaatcccaaatttctagttccgctacttgaccagtttgtgcatcacgcgtaacggttgccggcatgtttttaatctttttagcattaaaatatggtacgcgatattgcgcatcttgatcaatcatctttttagccacgccagcatattgatcatagctccagtgagtactagtatccttatcaagctcattaaagttcaactttcttacttccttaagttggacttcagttaaatccttaggattaacatctgcagcttgtaatatttgaacagtttgaggatctaacttgtaaactgctgcgtcgttattttggctataactagtattattaaaaccattagaaacattatcactagtagattgagtagtgtccacccctacttggttttgagcattctgatcagtattagtagtatctgcaacaccagtgttgttttgattatttgtattattggtggtgtttgccccagtattattttgcgttgtttgatcttggtcctgatcagtagctacatcattattttggttagtttgtgcttgattttgatctgatttatcgttttgatcattagtggttgcagcttgagtatttctctgaccaactgcaggttgctctactgtatcagctttaactgttaagctgttatttatattaaacaagccaagtaaaacagctgctgatgcaaaggtaactaatgtgcttctcttgttcatctctgttcaatttcccttctgttattccatagccagtttattataatatcttgttcggatttttggaaccttcttaatcaaattgaaatattagctgtgattagcaaaattagatttagaattgaaatgctgtactaaatattaaaaaggttctgcttatttatgctgacaagtacaatttattgttgaattgtagctatataaaaagtctggtagctattgccatatccatctttcccttaatcgtatgcatcccattacagccaaaactcatattcctcaggaaaatgcatactatttaaaatattcgacatagtatcagggttaaattgctccttaccatctcttagtaactgtttaatagcatttgctatctcaacatattctgcctgatctaacaccagtctaagacttaatataagttcaaatacaccaggttgactattaagccttaaatcgtattggcccaagatatttctaacagaactcaaatttggtccccgatttattactttagaataagttatttcgttatgtgcaacagcatttctaaacatattcgtaacatggtttatatgttcaataacttccggcgtaatagcattactctgggataagtcattagtttttctatactttaaagtgaaatcacgtgctattttctgccttaattcatccttgcagttaatgtagaaataatttaaatctccaaaagtcataaattccgttacaacccataatggtatacaagtatgagaatcaatataatgctttatcgcatttcttcctcttttatgcgcttcttgctctatttttgttgttagtgagctgattgtttttaaaactctaacagtattatcactatcgtgcttaaaattattaatatccaaataagaatattctacaggaaacatttctgaaaacctataagccaactctgaatttaatgtagtttcataagaaagaagaccattgtataaaatggctctcaactttttatcaaactggtataaagagactatatcttcaattttcgttccattaatatactgatgcggattaattatattacctcggtcattttttcttaaaaagagacctttgtaaccattaattaaagtataatagcctattttacttaatacatttttagcatagtcgtcattttcaattaacattcctttttgtcggagaatgtctatttgctgatccaaatttttaaaaggcctactcgttagttccaatattaactcctaaaaaaacaaaaccttgataataacatccaatgtgaatattatatcaaggtttcgtttagtttagaaccttctcctagtgcctctaaacttgatctgtcttaagtattattatacgtagttacaaatatgtttgcaactaattagataactttgtaatcctttctattcctacacgttttcttaaactaagcattaaactttgtttgtaacaaattataaatagttgcgctttcaacctttagtaaataaatatcaatctcaatttatacaaaattctgacataaccaatcaattactttttgaatctattttacgattgtaatcatcaatagcctttatagtcttagtaatcgtttccgatccaattgattgatataattttttatcaccaataataaagaaccatacttttgctcttgtagctgcaacatttatgatatttggctcacttaccgcccaattagcagcacccttttctttatcagaagcacctagaacaagaaaaacaactttattctctttcccctgaaaagtatgaactgttccaacatttgatggcttaccattttcatatttaataaagttaatatcctttagttctttagtcaactgataagcaacattcttaaaaggagtgatgacaaaaatatcatccattgtaaatggattattcgagttgtttacaattttttgaatcaagcgttttaacattcgtgcttgttcttctacaaatttattttgagatacgccttttacatcaatccaatttcctgctccaatttttccttgtttcttttctaatttaccccctttagcttctttttccttaacattacttggtaaaaccattttattattataagaaattgtattagctatattaaacattggatttaaacagcgtctatgtacccaaagcggaatgccaatccaattttgatgttctttgtctttataataaccgtactgactagcctgacccataatcgcttgaaccgatgtatctccagaaacgtatttttcacctactttgaaaattcgatcaccaataagtgaaatcactttagaatctaaagtattgacaggcttaatttgagcgggatctcctactgccataattttttggctacgtagaagtggacctactactgattggggaactgcttgtcccgcttcatcaataaataaattagccacagaattagcaggtaagtttttaaacatccgatgaaaacttgcaaatgtagtgctaataattggaactgcaaaattaatccattgccaagaatatagcgttaattgctgttgattttcttttacctttttatcttgattattccaattaactatcgccattattagtgatttgctattttcataaagaaattgttttcttactcgcaacgccaatacaaacagcttagattcttctcgtaaatcattcgaggtataccaatatgtttcttcctcaaattgatcataaacatccctatttgaaaaatcacgttgatagtttggaaccattgcttcctttagcttttcatcatttaatattcgagcataagtatgtgattcaacttgcaattgatctattttattttccaacttatgcttctcagcatttttctcctctatcacacgttttaattttgataatttttcattctttttccttttttgggttatcttttctttattaaaaaatctatctctaaatctaacattttccattgatgaagcaatttcttgatactcttctttcttagaattaatctcttctgttacttcttggagaactggcgttaatttagaaaaaagaatatcgccatttgctacagtcgttatcttatactcttgaactttttcacgccatttttgtaattgccctaaagaattcgcataatcttgcaattgatttctcctattttcaacaagattatattgttttataaaatcatcataagcatcggtgtctgattgataattttcatcttgcaactttttaaccatttgtcctagcttatcgataatattattcatattttccttacgaccaccttcaagcgaaaaaagtccccaatactttggcttattcaaattggcgttagcgatatcatcaaagtaatgaacattcaatagttcatcaataacttctttaaagacatctttgtcaggaatttgcggtaattcgtctacaatattttgaacagcaccattattagaagaagttacgactatatttttattagagatttggtcgggtaatttcgtttgccccaccttactatctccaggtaaataaacatttttcttatcaagatcacaaatttcttttgcttgtctaactatcaactcagcaaagatatcttttaataaagtagtttttcctgtgccaggagggccattaacagttctgatatcattcttatcatttatagccaagttaattgccacttgttgcattaaagatgctggaaattttgacaaaaaatgccccattggataatttttaggttgtaatattttatcaaatatatcaatattcttcgtcggatcaagattaatccgttgatctggatttaaaccattcaagtaacgttcaagatgatcggacttttccttttttgcccagttcaaatcatcaataaaaaatgaatgtaaattaatatcatctgaatcaatctttttaacgattgaccaatagctcgtctttttgctaattttatatcgttttactaatttcttaaaagcttcattaaattgaagttcaaaacttttttcatctaaatcattttcttgaaagccaaaaagttcatttatgtcatttttcacctgatcttcaaactttttgaacttatctgaatcatcaattaattcttttttattaagcacataactactcattgtaacaaaagtttggtcttctaataagtgtaagtttttattaaatgcaatagaaactccaaatttagtttgcttattattaacttcgtcttgtaaattttttaaatgatatttgtgaacaattatatctataacttgttgaaacctaaaggtatcaatgtagaagatcaatcctgaatttgagctttttttggttaaactacctttatatttacggttaatcatccaacgaaagtattcataatagccatgtccctcagcctttgttggatcaaattgcttagctgcatttctatccccacgtttagtatttacgtcaccctcagatagttgttccattaaaatccatgaatttaatatattcttctttatttccatctttttacctattatttttatatcaacctatcaacaactacttaaacttctcacacaaaattgtctattttcctgtgatctgcataattttgcaaatataaggacgcatccccatttcatttctatgatagacaatgctagctaaaatccaaaatatttttcatgccagcaaagtacagatgataaaatttacagctccttttatcattcgctttttttcaaaagaaaaatatagaatgcaaaacttaaaatgattaatataattatccacgtagatggaaaagatgtatttgcaaatattcccagcaaaaatgcaatcataatattggctaatacgtcttttaaaaagctataccaccattttgatttagaaacttgatttgtattggcttcaaattcatattttataagcgcaaccacaaaaaacataccaaaaataaacagcatcacaattaatatgttcagcgttaagttactactaatccaatttattaatgtgcctataaaaaacaagttatagatatcatagtaattattcgctacttttgtgtacttctctaaatttttatttttgcgatacatataacaagcaaaaattacatccaatattacaaacaatatcgataagaaagcaaaaaacataaatttatatgttattacttaaacttcccacacgcaaaattgcttgtttcattgtgattctgcgtgttttgacaaatataaaaggcacaagtccttttcattgctataattatattgaccaaaacataatttatttgcatgaaaggcttgtgccaatgtctattttaccatctcctgaccaacaaaatgaacaactattttcaaactcaatcatcagcttcatcaagaagtttcaggtgatcaagctgttgagaaaatgtggcttccgcaaggaaaaaggcattagcctgttcagcttgtttctttacgttttaagcaatgtctttcgtgaccgcagcttatatatgcagctgaaaatggatcattttcaagaaaatttttccaagaactcatattaccgttttatgcgcaacgttcacgtcaattggctccacttcaccacacttctgtctgcgcaaatcattaataaccacttgcgatctttgacttcagaaaaacgggctgattgctttgttgtcgatgattcctacttctctaggaccggcttcaagaaaacagaattagtcgccaaagtttttgaccatgtatcaatgacttacaagaaaggttttcgcatgatgaccctgggctggactgatggagcttctttcatgccaatcaattcagtgctgctgtcttctcagaagctacagaatatgattggcgaaaataaagtttttgatcagcgcaccattgctggccaaagacgtatgcttgcccggactaaaggcacagacgtgatggttaatttaatcgaccaagctatgaaagcaggtcatcaagccaagtacgtgctgtttgacagctggttctcaaatccacatcaaatcgtccagctcaagcaaaggaagctggatgtgattgccatggttaaggttagctccaaaatcaaatatgaatttgagggagaacgcaaaaacatcaaacagatttatcgcagctgtaaaaagcgatgcggccgttctcgctacctgctgtcaatcccagtcaaagtcggacgccaggacaaagacggtgctaaaatagatgcacggattgtctgcgttagaaaccgtgccaatcgcaaggattggctggcaatcatttgtaccgacatgtcgcttagcgaagatgaaattatccgcaactacggcaagcgttgggatattgaggtttttttcaaaacttgcaaaagttatctaaaactaagtacggaatatcatggcctgtcttacgatgctttgaccgctcatgttgccatagtttttactcgctacatgcttatgtcagttgccaagcgggacgatgaagatgaacgcacgctaggcgagctgttctattgcatgattgatgagctggcggacattacttttagccattccttgcaattgattactgatgcaatgctggccagcgtaaagcaagtctttcatgccagtgaagcacaaatagctgaattcacggctgactttatcaatcgtttacccaaatacatgcaaaaattgttaaagaaaactagcaaaaataatatagaagcctaaagccaagcaagatcaagagattactggcttatttagtgtgggaagtttaagttactactgtatcaagctttgttaatttctctttatctattccttaatcgttttcagttgatcaatcaggtagaccaatgtatcaataaacttgatgtcaggcaaagaatcattcattaaatagaataagtcttcatcattgttttgtctttcctgccaagccagaagatcataagcaaccgctgtagtcgcaatatagccgcattagccgtcataattttaaatttgcaatttgattaaagctaaaaattgtttggcagtcttaaagtagattttaatttaccatctgcgaacgtaaagctgaataatttaactagggggactaacttacctgcgcttaataatgcctaagccacaagtcctaattgcttaaggtgatttttggtaacgaaaactaggaatcaaacaaaacatatttggcgagaatgcctagactgattgcttgtctaattaactctacaatattcatttgtcggcggctttggcccttcttttgccagcatggaacagtgaatgacgagaaaaacacaggggtcttgctttttttattatagacaaaaaaagcaaggaactacgcgggaaaggcatgatttctagctttcagcctttaattaaataaaaaatctatttatgatatacacaaactgttctacagtctcaagaattgttattatcatttatttcctttacaatacctgatttgtcaaacaactcataaaattccttaatgttttttttagtttgataaatatttctaaccgtttgtcttcctcgacaaaaagtaaagtacagcttttctttagcacgtgaaattgccacaaaaaatgctttacgatcagactcagattggtttgagaaactccaaaaagcactatcttctaatccaataaagtaaacagaattatattctagtcccttactcttatgtatagttaaagttgctattgaattctttcctaaataattgtcaattatttctttccatatttctttgatgtcagtatttaactcatttattgatccgcattctttaagctgctctataaattgagttttcgttctatttaattgatctatttctaagtattctggatagtaaacttgaagcctattaatcgtaaaaaagtctattatagattctacgattttacagtaataattactttttgatctattctcatggacttgaaccaatagatttttaaatagcttatcaaggaatacatttaattttttgatatatttttgctctatttcagcatcagctaaattaatgagaaatatttcagaagtctcatctaccagttcttgccactcctgtccatttatcacgttaatagacgctaaaatcattttcaaaatcaacttaactataggttcagagaaagtttcagtatactttgattcaaccctaacagttacatttttagtttttaaatactcttttatatttcttatgtaatcttcagggcgttgttttactaatatagcaatttctgaaggcttaacacccatacgtatttcttttataatattttccccaacaatttcagcttcttttgagggttcgttagtttctattagaaaaactttcccttcatccttatttttattaattattatgtcagggtttatatccttatctattttttcatacataagtttttgtaatttcactatatttaaagctgatcgatgattttcttttaaaaatacctttgttgctctaaattcacgcgtatactttccaaaaatttctttatccgcaccagcccataacattatttgctgcttattatcccctacagccgtaattttactttcactatttaaaaaacattcacggaaaatatcatattgcaaaactgtagtatcctgaaattcatccagaaacacaaaaggaaaagctgatcgaataatatgtcttacatatttattatgctggataatatataatgctagtctagaaatcatttcaaaagtcaaatacgttttttcttctcccattaacatatacttccaaaatttataattattactctgagggtttatatcattcaaatctactttcaaaagatcatttacagcgtttctatcaggaacatagccgaaggcatgttcgtatatttttgtttgagttgaattagaggagatttcatactgaggtctaggtcgtaaatctttcggcaatactaaataaaatctgtccactattaatttagcaaaagcatcaaaagtttttgaaataaatctacttccctcttctttaccaactctttttgaaactctatctttaatattctcagcagcatcacgcttaaagcttattgctaaaatattaaaaggagcaggacataatcctgtttgaaataaatatgatgctttctgtgctaataattctgttttacctgctcctgggcctgcttgaaccaaaatattatcatttgtaaaaatagcctgttttgcatttgattctaaaactatcccattactaggtttccattgatccttattcatcatttttcttatccaatttattctttacagactcaagtaatctttttaattgttcaggtaaattattgcatagctcttcttcagatatatcttccaaagcagtaaaatgtactaatggttttcctattcctaagaaaagcatattataccatctcattaattctatatcatttttatcataatcaacttcttcctctctttttccttttaaagttctatccaaaatttttttgcgttcatccgctttggtctttggacttcctgatgctattcctttatatttatccagaaaagctgctaacatcataaaatccaaatctaaaggaaaggaaaagaaaacatcatacttttctagttgtttcgtcaaatccaacaaattatttttattttctgctaaatcggcgcatttgttttctattttttctaattcgtcatcattaggattaaatcgcttcaactcatcaataatatctttaattcttttctttccgcctaaatatctcccataatcaagatctaacaaagttatatgtgctatatttaagctttctaataaatcccacaaataattaaccattcgtccagctaaaggtacaattgatatgtttgcttcatctaaaccagtatacgaactaattattttcgataaaactatttcttcactctcgccttcacctaatattactaattttgaaaaatacaattctgggtaagtttgaaccgctcttttaataaatttatatttttctcctttgtcatcaggcaattttattttcttcacttctgtcacggcatcttttgtcaaatgaaaatagcgtacattctctggcaatactctttttattattgctggaaaatgagaggtgattatagtttgtgtattatctaatttagttatgcttttaactttatccattacttttccaagtaaatgaggagaaatatgattttctggctcttctaatgcaaatattgttacaacaggatattcaatttttatatcatcctcttgtaccgtattttctattgctaaaacacttgcaatattagaaatataaaacaatgattttattccgtcactcatttcatccacagaaaatacattattagttacatttgaattaaattcaaaccgtatacgactcataatcttattgatatctatgctagatacactagcttttacattagaaaatctagaattaggttctagacttttccattcttgatttaaagtatcttgtattaatttacttcctttttcgtcccaaaatgtatcatttaattgtgatgaaatgcttactatcttttgtttaatttcatcatcccaattaactctttttatcaattgagaaatcattccatctgaggtattacttaattgtcgttcaggatttctaactgcaggtacataaatgaactgtatactgcttaactctgatcttctagctactatcttattttcttcattattatcttctagagaagtcatgaagtaaatatttgtatctactgttccatcagcaattcctgaattcgtccaagtagattcaagtctaattcgtaaaagcggcttatcttgtccgttttttatgattagccgattccaatactgtgcttcacacttcttatcttcgtctttattagctttatctaactcaaaaacagcttcaatatataggtccctcgattgactatcttgatttgctgaatttatataaaaatctgattcatgtattattctatccgatgcattatatgagaataatttattaagtgcaagaagacaggctgttttccctgaaccatttgtaccaataaatgctgtttcttttgaaaaatcaattttcgtttcttcattgaacgatttaaatcccttaattagtaatgtctttagtctcaatctaatccccctcatctataatatatcgttattcaaatacacttaactaatgccactattcttaattttactctttttatcaaaaatcattatttaaatattcaaaaaattttatttccggatttaaaattgaagtgcaacaccaagtgttaaacaaaaaggccacgaagacctaaacttgaagtgacgaaaaatcaagaaaggaagatcttcatgaccaactcaaattctagcatttctaagcactatcatcaattaaatatcgtacagcgttggtgaattcaaacaatattgatgtctatgaagctcaaaagacgcaggaacaagcgtcatcacaaccacgacggtcacgctttgcacaaaaagcatcttggcaattccattgaacagcgtcctaggagattgcaaacagaaaagctccgctgcactgggaaggagatctggttaaaggcgtcagacgcaagaatcagcctgctttaatgactttgactgaaagaaccacatgctttaagtagttatcaagattcctgactatcgggcaagcacatgccaaaggctgccagatgatctattttgctcacccatattctccatgggaaaggggcaccaatgagaactgcaatggtcttttgcgtcaattcttccctaaatgcaaaagtatgaaagacaagtcagctgcttatgttcatgccattaaccacaaacatatccaaatcttccaatatcagacagcagaagaaatcttcaagcaatatgtttcttcatagcctaactgttgcacttaatttgacaattcaacactttcaacctttagctatatcaatctaatctattccaaattagattatcagtaagcggaatagactggagtcttatttgttcatcaaagtttttacattcttttcttaaaataagtactggtctaacatcatttaaaaatttcaaatttccttcatttatcttattatgaaattctcggtttagctcaaacttacttattacgtgattttcaatatccttcatttcatttattggcaatttcttacttaatttataaagatctaaatagtaaataaagtctgctttaatttcatcattccatttttttacatttgttgctggaaatataatattagacaaaaaaattctatatgaattatcatactgtgctttattttcaaaatattcaaaatttttatttgcatgttttaaatacaaattagttctcatacgatcattttcatataaaaaatattttatactatgtggattagaaaatatcttgcattcagtaatcgcataggcttgatcatcatctataagaattatatcaatttctttttttcctgatttatcacttattgtatttttctttttttctatactatatccagactgttttaaaaattctattacataatcttcaaaccaatgccctttcttattactccatttattagtattttccataagtcttgtaactaaatatactggatccacacaataacaagttggtaaatagacaatattgccaaatataaacggagcatccattatatctctatgatacgtcaacttttttgtgattttaccgaaactgtcaaatcttttgtgtaaatagatctttctcgtaaattgattttttaattatttatttaatcaaagtaggattctaaggtgtcctgaacctgaccaaagcctttatgaattcgattgaaataacggtcattgtagctcattgcctgaatgccaataaaagcatcaagcgactgttcagttggaaactctgccttaggcttagctttgcgcttgatcacattgttaaatgattcaatcatgttagtcgaataaattgaagctctgatctgcttgggatagttataaaagaccagcagatctggttctatgtctttcaagcttctgataacatggctgtaaaccttgccccatttgatatagaagtcatgcaggacagctgtggcttcttctttgtttgtctgttgatgcacctgtttgaattcgttcatgatcttttcacgatcgtcgacgcgtactttagcgcagatattgcgcatgacatgaaccaaacagcgttgaaaatgagctttaggataagtcctggccaaggctgttttcatgccaacaacaccatcagaaagaaaaagctcaacttgctttaagcctcgggatttcatgttttgaagcatatctgtccagacttcaatgttctcgctaggtgcaatgcagtagtcaatgacctccttgtgcccattaggcttgatgccaatggcaatatagactgcttcacgctcaaatgtttctcggcgcaaaggaaggtatgtcgcatccaaatagacgcagaaaaacttgtcgcttagcttgcgtttgtggtaagcctcaacctttggaatcatctgcttggaaatatttgatacctgggctggactgtaatggctgccatacatcttttcaattagatcggctatttccctggtggtcacgcccttggagtaaagcttgataatcatgctttccaagatatccgagtgctgcttgtagtcaggcagcgtgtgatgatgaaattgaccgttgcgatcccgaggcacttgcacttcaattgggccaaattgcgtatgaactttgcggaaataagcaccatttctagagttgccagtattccagccatttctggcatagggatcatagcccagaaaggcagtcaattcagcttctaacaagttattaacagcctgttgtagctctttgcgcaataaatcatttattttgtctggattgaatagagcttgagcaaaatctttggtaaaatcattcatgaaggagttcttctttctgtatgtgtttttttgttcaaaccaatcatacgagaaaggaactcctttttctaatgtttaaagaaataaatttaaggaatcattcatccttacacaaaatattttacggtctcattttaccaatatcattcaaataattattaggtataggttttaaatgattattaattatttttatataacgatcgggtaagtcaaaaaaatttcttggaacatttcctgatattaagtaatctacctttaaaaacaatttatttttctttaaagaaaaaaacacttctgctataatttcacaattatattgaattatatttaaaacatccaaccattctattattgggataccatataaagtttctgcacctaatttttcataatcttcacgattctccttattatcaggtaaggatggtaatttataaaataaattttctgcaattccttttaattggtataagccccatctacatggattctttttatctatagaataaatatatttactatttaattgtctaagatccgaattttcatttctatttacaatataagtagcacatatatcgtttacagaatcaacaatatatttctttccatgtcttataattctagcatttccatatttccaaaactctattatgttgtaaaacatgtctatatttcgatcataattcgtcgaatttaaggcttcaagatcatttatagaatttacattttttaaattagatgcaagacgtctagaaaaagaaccgcagtttatttccatcttttcattcaaagtttgtttactattttgattatggaaagcatttattacttgatcaaaattagtaccataatccaaagtctttgattcaattatttctttctttatattcttaaggctctctaaatcctttaaaatcatagatgccttattttttattcttggacaatagtctccaactatgatttgtttcacaacttcaagatacttgtctctagtatttgaccaattaccataatcatcaattatcaaattcgatgatttaatgatatctaaaattctagtaagttttgaaaaatctttcttacgtaaattgcaataataaattgaacacttaagctgcttgatagatatgatccaattctctttcaaagatttcatctggtgtatgatatgccaatatttttcttggtagcgaattgcaccaggtttcaatgtcaatgatttcctgaagagaatagttattgatgtaatcacccttaggaatgaatctgcgaataaggccattgtgtctttcaacagtgcctttatcgcaagaagtatatggatgggcgtaatagactaaggtattagatacttcctctagattggaaagatccgcaaactctgaaccattgtcagttgtaattgtcttgaagatttcattccagtgctcactatactgtttatgtagagtttgaaaagcgctcataacactggcagctgtcttgtctggaatacgcaagattagaaactcacggctcattcgctcagacaaagttagcagtacttgatcatctctagtcttatgtcctaagactaggtcgcattcccagtgaccaaactcttttcgatcattaatctctttagggcgttcttcaatgtttcgacctaatttcttcttgttcttatgaacacgatgaattttagtattacgctttaacttctcaggcaaatcagagtttttgatagccaacaagccttgatctacatagttatatagagttctagggcagactatctggtcgctgctaaattcacccacagccaagcagcgattggcacatacatcaagtgaccaattgtcttcaaagaaatgcttattgacatacttgataaagtcagatttcttcaagaagtctggtttgcgaccacagtggcgtcggttagtctgataaacactttgaccatgatcagccttgtaacgcttctgtttgccacgataaagaggaacagtgcctcgtctaacttcgtaactgattgtagaaggcgaacagcacagctcacgagcgatagctctgatagagcagccatccttcaagcgagtttgaataataacccgttgttcaaatgataaatgctttcccttttgatgctcaggcatgatagaatgtaaagagtccatttgtgacctcgtttctgaatgttttgtggtaattacattttatcaaacaggtccaaatggactttttatttttctaaagtgttcaatttgattttataatcggcgaaaatctttcttatctaaattcaagtatttaatgacctcattataaaattgttcattgtttctattaacatcttctaaagcacaaatagacggtctcttcatagaaactttatgctcttctttcttcgacttctttgacattttgtatcctcacttttcagcgtttaatcacaattcgtttaaaataatgattaccatcagaatctctaaaaacaggtgaaacgattagttcatttttatcattaccaaacttttttatttcttttgccccctctattatagattcagcctcaaaattatattcattaccaaaacaatgtggcataattaactcggcaaatggtatcattttgtaaccattagaatattgaggacaaaatatctttttttcataaccatcttgtctatcttgaatacagtcaatattcttccataagcaaaagccaactaattcagcactttcttcattatttccattgcataatgcacgcaccttaaaactatcctctttattcacttgtattgtgtcacttagatattgaactttattacctgtaactcttatttcaagtacttgttcttcggatatattctttattccaaacgctatcaaaccactaataattccaactacagcaaataaattttttcctagttgatataaaatcaatggattactcatgaccacaggtatataaataagctgtatagctaaacttactaaaacactaatttgccacaacccaataggatacttattcgccaaaacactagttttgacgtttaaactactaaaatatactatgaagagagttacaattaaaaatactattatccatgtaaggtagtctatccaaagattcttacttatgaacatcaatattaataacataatatttactaatccaaacgtagtacacgatgaaattaaaagtgaaatcagaaattgtcttgatttcactttttttagtgtcaacttattttttttcatttgtattgtcaccttctaatcaatctcgctagtcttcaaacgtacaatactactcctaaacttatctaaatcgattcctaaaatttgagacagaatttcatttggaaatacaataccatacatttcacgtagtttatcattaagatccttagggtgaacaacatcatgctcttctagtaattcaaatgcttgatttagagccttaggtttcgacatgattttctcatcatccattatttctttagtacgccagcctctatagcttatctgtttttgtagcttgatatattctttatcatcaatcaactgaagatcatgagcccgatgaaccattgcagctattgatacattccacttagacttaagatttataaatgtatctatattaataaatccatttttagttaaatcagattcaaagctttcctttggcattaagaatgctgacgcaaattgattagcttcattttcgatagttctatagtcttgtcccagtaaatcttcttgaggataatagagttttgcatgcattgcatagtgacctagttcatgtgctaaagtaaattgatccctgaagaaattctgcttttttccattcactaatactatgtagtattgcttttcacctatttcaacataaccgcttctagcatcaatcttattagaattaaaatcaacattaacaattatcaaaccatgacgttccattaaatccacaatatcgctaattggttgatcatccagattccatattcttcttaattcattagcagcattttcaggtgattcttccaactcaagcttcgtatctaattcaggaaaatctatataattttcaaaataatctcttagatatgccgctgcttttttataagttttactaggctgtttttcagattgagtagctgtcaatctgctacgataaaaagtaccatcatcttggtatggtactttctcgaagtctgtaaagaaatataatgggaaatttagtacttgaactattttttgaaaaacagctgaactaatttcaattttgttgtgctcgtatttcgatattgcttgtttagaaacaccgatttgatcagccaaagcactcatagttaaatgattaaataaacgcgcttctttaagccgttttccattaatttgaagtgacattattattctcctcactcgttgtcggcctcttagccttattagcattccatttgacaatactatcagacttattaccttccacattattcttttgattatcatatctagttgtatcatcatcaggactaggagatttatactctggaattactatctcatctatgacattgaaattgttatcaactaaaatttccaagccattaacagcttcatcatcaaaataatcataggtaattataatggttctttttaatttagtaaaatcattacctaaaattttctttgcttcttttaatctcttttctgctactactttattatttccaatcccctctaatgacaattgctcagcagaagcgacattattaattgttaaaggatacatatagtgagtatatttaccattttgaatcttacgttgaacgactagaaaatttgtatatgaagtaactaaatataaagtaccatctttgacattaaaaacacctattgccttccaaatatgccggtcaattgaaatctcgactaaccatggggtagaagcaatatcatcagaaatagtattaaatctgtggtcccaggtattaaaggataacccattaatatattctccccctgcttcttccatataatcatccctaacctgagatttagtaatggtcgcacctggaacgatctttcatagtacttcatcgtcagctttaaaaatattcatgtagtatttcctccataaaaaatatgctatctatttacgcttataatagacttatttactgcagttttcaactaatagttgacaaaattagtgcattttctaaaaagtgatataattatctttgataaaggaagaaggtgactatatgaagaaaactcaacacgttgttcacaaccataacggtggatgggatgtcaaagcttctggagcaaaacgagcaaccaagcactttgagactaaagcccctgctgtcgaatttggccgcaatattgcgaaaaaacaacatactgaattttttaatcatggaaaagatggaaaaattcaaagtcgtgatagttatggaaatgacccatttccaccaaaaggataggtgtctattaatgaatagtgatactaaattagtatttcagttgttagaaaaaaatgctagctcagagcgcccaaccaatattacatgtgacaccagcgacattctacaacaatctggtttgtctattgcaaattttaacaaggctattagtgagttaaacgagctaaatataattaatattactccaggaaataatattgttgctgatattgaattgcttcgaatcgattagcttagtaaatattaaatagaaaagtatcttctatcttgatgggatcagattaatactgaagtcatcattttaggagatattttttgttggaaaagacaaacagccaattattgttttaaaacgccgtcaaacccaacctcaagttcagtcggaaaaagctcacatgcacaatatcccttactcagccttaaaagaaattcaaattaatggttttactgtgaatcaccagaagcctatatgcatatcctgttggatagctattcaacaataaaacagggtacatagtaaagcactaatgatggtcaattagcaattttcacaaaattttgatagtgcccatccacaagaatatttttagcttaatcgaagctactaaacgatattgccttattagaactgacacaggaaaatcataatcaggaaaaaactgaccatcacttattaataactaaacatgacaacactattgcccgaaaaatcttatatcgaactattgggcaaatggagacagttaagtcagctcaaccttgtcatatacggattactatgaccataaaaaacagctttctgaagccagaggctacaagaaagctgctattgcgtctatgcataaactgatacggacaatctatgctctgattattaatgatcaaccatatgattaccataaagctctccgtaatcaaagataatgattaatcaatttataagtatatcagcctgcacaaaatgattaaagtggagactggttttgtcatgcactgaatttggtttcagactgactttgatcttattcgcactattcaaatttttctttaaatcattgataacacttgattttagatagaaaaaattagtttttaggattgggttgaataagtaaacatttaggaaattgtgattcgctataattaaaactaataatttttttctttgattttaaaattttgatttcaaaatttcccaaataatatagctcaaaatatgactgagaagaagtatgatctttttcccatcgatcagcatatcgtttcaaattatcaaacaaagttttacaacgagcgttttcaaaggtagtaggattaatgattacctgtggtttagcatttacaccgtttaaccaagcagctggaccagaataatttaaaattaaactttgactactgtcattattaaagtatctacaatatgcctgtccataatatatatgaactgctttatccaattgtgcttcctgcacctttttaaaaaacaaattaaaatcaatttgatttccatccgcatcgtacactttttgatttaaattatattctttataattatcccacagttcaacaatctctcttaattgatttgtatgatgcgcacgcttttgataattataattggaattttcattttttctattataattatcaacaattctagttggaatatctggatgattatttgaacttactgctattttttgtgtcggtttcaaatttgcaattaatccagttacttttgaaaaatcaaatattattttatcattttcaaaatagtaaatttgatttttagtgctatcctttcgatgctcagcaataaattgtaattttcttggacaatcaagtgaatgaaattgattgtgttttctatttgcataatatggtcttattttatctggatgattatcaaaatcaacaaataaattaatgcaactcagttcaactgaacattctttagcacagtaaaaaatagtattttcacaaatacgacggtaaccatatactttatttatgtcttctaaatatattttattcgcgtcagcagcagtaaccattccatcaggataattatcaggatctttctccattaatcttttacagaatgctttttcatattttggcataataatttctcttttcttttttaattatattataggatcatgcctcacatatggaataaaatttatagattttttaatatttattgtcgaccgaatttaagattgacgtgcaacaataagtgttaaacaaaaaagccatgacgacctaaaccaatgtcatcaagttaaaacattgaccataaaattgtacgtttttgagaccgtaaaatattttgtgtaaggatgaatgattccttaaatttatttctttaaacattagaaaaaggagttcctttctcgtatgattggtttgaacaaaaaaacacatacagaaagaagaactccttcatgaatgattttaccaaagattttgctcaagctctattcaatccagacaaaataaatgatttattgcgcaaagagctacaacaggctgttaataacttgttagaagctgaattgactgcctttctgggctatgatccctatgccagaaatggctggaatactggcaactctagaaatggtgcttatttccgcaaagttcatacgcaatttggcccaattgaagtgcaagtgcctcgggatcgcaacggtcaatttcatcatcacacgctgcctgactacaagcagcactcggatatcttggaaagcatgattatcaagctttactccaagggcgtgaccaccagggaaatagccgatctaattgaaaagatgtatggcagccattacagtccagcccaggtatcaaatatttccaagcagatgattccaaaggttgaggcttaccacaaacgcaagctaagcgacaagtttttctgcgtctatttggatgcgacataccttcctttgcgccgagaaacatttgagcgtgaagcagtctatattgccattggcatcaagcctaatgggcacaaggaggtcattgactactgcattgcacctagcgagaacattgaagtctggacagatatgcttcaaaacatgaaatcccgaggcttaaagcaagttgagctttttctttctgatggtgttgttggcatgaaaacagccttggccaggacttatcctaaagctcattttcaacgctgtttggttcatgtcatgcgcaatatctgcgctaaagtacgcgtcgacgatcgtgaaaagatcatgaacgaattcaaacaggtgcatcaacagacaaacaaagaagaagccacagctgtcctgcatgacttctataccaaatggggcaaggtttacagccatgttatcagaagcttgaaagacatagaaccagatctgctggtcttttataactatcccaagcagatcagagcttcaatttattcgactaacatgattgaatcatttaacaatgtgatcaagcgcaaagctaagcctaaggcagagtttccaactgaacagtcgcttgatgcttttattggcattcaggcaatgagctacaatgaccgttatttcaatcgaattcataaaggctttggtcaggttcaggacaccttagaatcctactttgattaaataaataattaaaaaatcaatttacgagaaagatctatttacacaaaagatttgacagtttcatatcaccttgagtatcacatatcctttttaggtctttaatagcatcttcgtaatttcctaaaaaatattcggttaatccctttaaatacttaatattaaccttaaattcattataatcagctatttgttgccataattctaacgctaattcaaagttgttattttgcaaagcatatatgccatttattacatttgcgaaattctttaactttttaggaatatattctacctttttactggtattcttttcaaaaagtagccgtacacccttttctaaaatttgatattttggattattatcagctaatctagcacttactattaaagcatcactattattactatttacatccgcttttaatatccgcaattctcctacactagtgtcatttttatctataacagcattaatatccgcttttaatccatataaattatgagtaatatcaattgatactgaaagatcaacatattttttatgtttatctatagcatttaaaaaatctttttttgtaattattccttgtgtacttctacattttgcacatattcggagcaaactattttccaaatcgataaaattaatatcaataatttttaaattttgtaaacacgtggctaatgtgccaataatatatttttctttacttggctctggaacaactataaaatcacttttttctattttaagtaaatcctcatcctctatattttctatttttttcttaatccagatagataatcctgtatcattattttttcttcgatcatttaacccatctataaatcttctaagatcattatttgcatgacttaaataaatacaataattaggttcattagaaggcagcttatgcactacttcctttacctttccaatagcttcaacgtcagacttaacttgtcctgaaataaccctatttttatcttcattcaacactttaaaatcatttttgttttctggttgaactcctacaaaacctggtgtcatatagttttgtaaaaatgcatccaaagttgcatagtcctgatattcaaagcccttagaagcagttactccaccttgtcctttatttggcaatatccatctctcctttatagtatttttatgaaaccattattgttaatttcgacacaacttttttctgttaaaataaatatttgctattttttcattatacataatctttacgtccaaaagcatatcaaaaataccgactatagtttaaattctctcctaaatcccacttaacttcaatcaatctacgatgaggcaccccagaatttcatttagcctagcgcacattatgaagccaagttccttactctgttccaacaactcacgcaaatccttttcagtctttacataagatgcattttcactcaaagcaacaaaatcatcaacaattttcttcaccatctcttgtcactcttcctcattattcatcgccattagtcttccttttaaaaaatctgcttcaactcaggaatctcttcaagtaatctatcacacccattaaccatattctttactattcaatgattgcggtcaaccttactatgaccaaatgtctccaaaacaaaaagccagcatttgcgctggccatctttgattataaaaggttgttcttcaatattatgcaacactacgttactgttaacttaacttttgtgccaatttcaaaatatacttgcgcagatcttccttggtttcaggatggttcaagccatattcaatcgaggtttcgagataaccttccttgttaccaacatcatgccgcttttccttgaacacatgggcaaatcgtcttgttcaatgtatcaattgcatcagtcaactgaacttctccacctcgaccgggcttggtttcagccaaaatatcaaaaatttctggcgttaataaataacgaccaatgatcactagatcacttggtgctttatcaatagctggcttttcaacaaaattcttcacattataaagactgtcgttgaccttgccatctggcgcaatgacaccatactttgaaacttccttgtgtgagaccttcattacagcaatgtagaagcatgagtctgctcatagtcattcatcaactgcttagttaatgggattttatcatccatgcagatcgtcgcctagcattacaacaaatggctcgcctgccacgaaactttttgctcgataaattgcatctcccagaccagccggatggggttgacgagtatagtacaaatttactcccaagtcagtaataccttgagtcagctttagcaattctaactttccagttttttcaagatcttgctctaattctggatttgagtcaaagtggttttcaatgacacgcttattctttccagtaacgatcaaaatatcttcaatcccagattttttagcctcttcaacaataaattgaatggttagtttaacatacaccagatgaaatatttgagatcgaatctatcaagcagcctaagtgttcaattcattattgcaattttcaatttttaatctttactattcaatatttaatttacgtctttaattggtggtattacaaatctattattcatatatgatggcttaaaatctaatttcttaaatttagtatcctctcttgagatcatttctcccatttcattaccagatacattgctattatttccgttaacaaaataatattgtgcatcttcaaacatatcctcttcttttgctcctttactaaactcacagaatcctaattcaccagctgaggttaaaaattttatgatcatattagtcagttttatttttgagctataatcattaggtattataaataattgctcattagacgaaaagcccgaatacgaataagtatctattacattttcgccgcaactatcagtataagtcagttttattgccaaattataaacaacattaggcgatatattaataatttgtattttagaatacttacttccattatcttgtaaaactttttttactatttgcgtatcatgtttacatgctaaagtaacgatttctttgtagttttttatagttgatgcggatttaacatcaaatctaggacgtttttcttcaatatcatttgcctttttaattttattttgatttttaacctgtgcaaaacctgctatcaccgcagcaatagtaccgaagccacctatccattcagcaacactgcctaatacctctccattagcattaatcattgcacctatcaatattccgaatcctaagcaaaaaagtgatactaatatcccatacacatatctatcatctatatttttttccttcttttgcattatttcatattcatccttttctcttttcctaggcatttcaataaatatcggttttgaaaaaatgtttccctcagagtcattatatataacaagtaaactatattcattgccaactaattttacttttcgaaactgtcaaatcttttgtgtaaatagatctttctcgtaaattgattttttaattatttatttaatcaaagtaggattctaaggtgtcctgaacctgaccaaagcctttatgaattcgattgaaataacggtcattgtagctcattgcctgaatgccaataaaagcatcaagcgactgttcagttggaaactctgccttaggcttagctttgcgcttgatcacattgttaaatgattcaatcatgttagtcgaataaattgaagctctgatctgcttgggatagttataaaagaccagcagatctggttctatgtctttcaagcttctgataacatggctgtaaaccttgccccatttggtatagaagtcatgcaggacagctgtggcttcttctttgtttgtctgttgatgcacctgtttgaattcgttcatgatcttttcacgatcgtcgacgcgtactttagcgcagatattgcgcatgacatgaaccaaacagcgttgaaaatgagcttttggataagtctgagctaaggctgttttcatgccaacaacaccatcagaaagaaaaagctcaacttgctttaagcctcgggatttcatgttttgaagcatatctgtccagacttcaatgttctcgctaggcgcaatgcagtagtcaatgacctccttgtgcccattaggcttgatgccaatggcaatatagactgcttcacgctcaaatgtttctcggcgcaaaggaaggtatgtcgcatccaaatagacgcagaaaaacttgtcgcttagcttgcgtttgtggtaagcctcaacctttggaatcatctgcttggaaatatttgatacctgagctggactgtaatggctgccatacatcttttcaattagatcggctatttccctggtggtcacgcccttggagtaaagcttgataatcatgctttccaagatatccgagtgctgcttgtagtcaggcagcgtgtgctgatgaaattgaccgttgcgatcccgaggcacttgcacttcaattgggccaaattgcgtatcaactttgcggaaataagcaccatttctagagttgccagtattccagccatttctggcatagggatcatagcccagaaaggcagtcaattcagcttctaacaagttattaacagcctgttgtagctctttgcgcaataaatcatttattttgtctggattgaatagagcttgagcaaaatctttggtaaaatcattcatgaaggagttcttctttctgtatgtgtttttttgttcaaaccaatcatacgagaaaggaactcctttttctaatgtttaaagaaataaatttaaggaatcattcatccttacacaaactattttacagtctcttttttgatttacataaataaaatacagtaaaacagatataacaacacctatactaatacttaaagaatttaagtctttaaaaaagttgataaaacctaaatataaaaaaactataaggtaaattgaatattcatacagttttactgttttccatctcatattttttctcataccaaattaaaaatgtgttttcgtttttatacctatttttcgtttaattaaagaaaagcctttctttaaagtattctttccaccaatttgtccccaaggaacttctacataagtaaatgaattggtaccaagccaaacatccattaacaactcagaaatatatccaaatactctcgcttcttgcacagaatattcagaaatattaatgctattttctagcttacttagaacatcaaacatgaagctacaatatgattcaaatgcattccttttcataataaacatattaaacatatgagccccacgctttttcataactttatcaaaagcaggaagataatttggatatacttcagcaattacctttcttgcttcatccaaaggctctttatgatgtgcatgaatgtaatgtgaataattagtttcaatataataatttctttttttaggtaaaattacatcatatttttgtaaaagctgatttactttctcaatactaattacattatctaaagaatatggtcttttctcaaagagtaatcttctatagtgaactaatccaatagcgtcaacatcttttaaattcttccaagcccaataaacagcagttagttcattgtaattaggatttttagaggatatattttcaccatcatcatcacgctgataggaaatacctggtttataattctttactgcgcctactaatactggtaaatatccttcctttttgggcataggaaactctttatgcgcagcaaccaaaatttctattttcaaagactcttctcctgatcaatacgctccattaggatgaataaccaccccaattgtcttaacaatcaacttcaaatcttcccacaaaccggaatggttgatatacacaatatcaagccaaaccatttcgtcaaagtcagcttcactacggcgtgttacctgccacaagccagtacaacctggcataacgagcaaacgttgcttatcgtagtcagtatactcagctacttcagagggtagagggggccgtggaccgactagtgacatatcgccgatcaagacattccacagttgtggcaattcatcaagactatacttgcgaattgtatgtccgatcttcgtaattcttggatcgtccttgatcttgaacattgcgccgtcaatttcgttctgatcttctagttcatcaagcatttgatcagcgttaacgaccattgaacggaacttccacatcttgaacggcttctcatctttaccgattcgttcttgagaataaaatgcaggaccaccatcttcatgtcttatttttattatcaaaaataaaaataacggagatagtaaaattaacccaagtgcgctagctagtatatcaaatatccccttaatcgtgtgatacactggtcgtccgttaacttttgcaggattaacttgtagtttatcatactcctcttaccctctgtttgatttagtctatttgaatacactctcttattaatcttatcacgtttaacgcaacttagaagcaaacttgcatatttgcaccaagcattaaaataaccagaactttttcttctgcttcaatgggtgccaatccatctgaactgggtcgccattgatgatacttctagcattatcttgccactgctgagctagatcttgactgaattcttgactcatctttttataagcttcactcaattgatactgccgtcttggcaagtcgtgtgcgtcgctagcaaaggtgcatccctgccccgtcgcaatcaacttacgcgacatctcttcgattttcttgccaaagattcctgtataagagctagcagtaatttgcaccaagcagccttgttccagcatcccttgcaaaatttccggttccttcaagatgcgactattgcgctctgggtgtacgataatcggcgtcaccccgcgctgcatgatcttgaagatcgtgtcttgcgcataagttggcacgtcctcacttggaaattccaacagcatataagtaccgtcttcatcgcagaacaggatatcatcgttatcaagcgcatcaattaagtcacccgacaagcgaacttcctgccctgggaaaaccgtcaacggcaccttggcctcatctagcttctgttggtagagatcagtcagccagacgatatcatccttatggttagtgtaacgaccattcagtgtatgcggcgtacaaattgcatgcgttacgccatctttgaccgcagccttggctaacttaattgaagtgtcccaattttttgagccatcatcaatgccaggcaagatgtggcagtgaatatcgactaaaaccattattgatcgtcactcttttttctaccgaacaggccctttttcttctcagcgccatatccataaccatagccatacccgtagccgtaaccatagccaccgttttcagctctaatgtcgttcatgacgtagcctagaatccgagctttggcaaattttaacatttgcactgctctagtaatcccagccttttgcgtaacgccttgacgtactactaagactacgccgtcaaggtgactagccaactcttgcgtatcggatacttcaagaacaggagctaagtcaatgataaccatatcataatgtgacttaaccaattcaatgaaggtttccattctgcgtgaaccaatcaattcagctgggtttggtggaatcggaccagaagtcaagattgacaagttatcaattccactttcttcaaccacatcatttaaattgattgcgtcagcttctgaagtaagaacagttgtcaaaccagtattgttcttaacgttgaacgtactgtgcaaagttggacgacgcaagtcggcatcgattagcaaggtcttgcgacctgcttgtgcataggtgatcgctacgttggccgtaacggttgacttaccttcactgatgttagctgaagtaaaagctaaggtactaatttcttcatcaactgccataaagttgatgttagtccggatagttctgaattgttcagataccgcactacgaggatcagcaactgtgattaatttggcaccatgcttaattgtatcgtcggtaccacgcttttttctaaataatgccatttacttctcctctcctatactcgacggcttctacgcttagggccattagaattcttattcttttttctaatgacaaatgatgatgacacatggaagtgtgaaacttgacctaagtcaactaaacctaagttatcagtcaagaatgcatcatccttaactgtagtgtcggacatttcacgaattaagactactgcgaaacttaaaaccaagccaataacaaagccagccaaggtaaagagtttcacattaggtgatgattgattaccatcagttgctggcgcaacgatcgtaacgttgttaatgttcatgatgttaggaatttgatctctgaatgaacgcgctacagcgttagcttcaacctttgccttttcaggtgtatctgcagtagcagaaattgagaagacctgtgattgttgttgagtattaactgaaacgctcttggctaattcgctagtagaaacgctgtaactcttaccgctacgttcaactacttctggttgagcctttcttactaatactcggcgaccctctgcattagtcttgtacttagcaggtttagcctttttaaccactctaactgggttagctaaacgattagaagcatcttgcaaaataacatgactagttacaatatccttataggtagtaaccatttgcatgttggcttgttgagtattatatgccgcattcgggtcattcttgttagccttttggttaaccaagatctgtgcattagaagtatactttggtgaaataataaaattagcgacgccccagccgactaaagccaaaccaacactccagataatcagtgcccagatgtggcgacggcaaatttgtagcaattgagtaagatcaattgtattttcagtttgcttttgctcttgttccatttaccttttcctttaataacgattaacgattcataatatagctagccttgttagcagctaccttaacatgtggcaattctagcgccgttctgatcttatcagaaactcgttgacgctcttctctacttaccacttcaatttccatagtgccaaacttagggttttgcgtttctttacttacaccctgagcatgatcttgagaaagattgttagtggcttttctataatccatagcaatcttgtacatttgattcatagtcaagtcagtctgcatctcgctagaaatggaattcaagaaacttgaattaagcaaagttgaaggtgaaacagacttcttaagcaaggccataattaccaagcggtcacgctcttgtctaccataatcctgacgagggtcaccatgacgaagttgggcaaatgctaaagcctttttaccattcatgtgataagtctggcctttgacaaagctataacccatattgttgaaagttaatggagaagttacatcaatccccccaacttggtcaattgccttcttcaaaccacccatattgatcatgatgtagccgtcaattggaacactgtaatatttatcaagtgtcttaatagtttcactaactccacccaatgtataagctgagttgatcttggttacaccatattgtgggtaatctgggaagattgcatttgagtcacgtggaattgaaacaatgcttgtactattagtcttagggttgattgacatcatcatgatggtatcagttctacccttccagtgacgacccatggcaccagtatctgtacccaataacaggatattaattggctttttctcattcagtaaattatcaagagtacgtcctttattactcttggtagtcttagcaacgggagtgtacatattctgcgtcgtatcacgcaaatttttgtagatcatcccgcaaacaaaaagaccgactacaatgatcacgccaataataatccaaaaaccgcgccagaacttacggtgacgacggtggtgatgatggcgatgacaatgtatcggtttattacttgattctgcgttattttccattctaatcctcttaatcttataatcgttattattatatactcaagaacccattttgaccacccttaaaaggtttacatgcggcaaatacttaaaaggaggctcgttttattgctgttttgggttgctgaaataatatattttggtagatgtctaacatgtaataaaaaatgcatccctcgaaaaatggaatgcattgctgctagattgagtttaaacggaattatttttcatcttactatcgccttgccttaaattgtactcacactgtacaatatttagtaagacctaaataaccaaaaagtattaagaagtacattaaatagaagttggatagcatgttaagtattgaagaatcaatcaaagaatttgaaacatattttcagggtaaaccaaatgaagttgaagtagtatcacgaactataaaacaaaaaagtagacggccacataaaccgcctactttatcctaattgttatgatgatcacttgagttagttaaatcatcatttttagttagatcatctatatttccaactactccaccaaatagtgtaaacacacctattccaccaaaaatactaccagccaccgaatgcctttgcatcaccaaaaaagcagaaatacaaatacatagaattgttactattgatactactatcagagatgtccatgcgagccaacctcttcttttttgactagcaacttctaatctccgtctatgcctactttcttcaacaccattattaaattatttccttagcagcattcggatacaatttttggtatccctcaagaatatcaggaagcggaattggtccactatgcatctcaagataagccattatttcttttttggtttctttaggcatctcagatttttgaatttgatcaagaatctattcatctagcgaatctttatctgactttttctttatatcattttctagctttttacttggcttttgatctgccataagatattattccctttcttaagtcgtcccctatcctttgccaatcactggcaatagctttttcctcagcattactattactagaatatatcaacttgtttaataatttgacataaggcatagctacatttttcgataattttttaaacactaattgaatatcggtaaacataattctcacctcattcataatctctttctttattaaaagtatacttaaaatttgactcgtggtaaagattattcttctacatgcgatccacttctttccttattataagcatctgtaatacaataaacttaacagcaaataacgaggtgtttttatgattgataatcaacctaaaaagacaaaagcttatatcgcgggcgtaaacttaaacgaccaaaacttcgactactacatgaccgagctggccaacttgactgaagccaacaacatggaagtagttgggcaaagctttcaaaatgcagaatcaattgtcgccggaacttacttcggtgtcggcaaaatcaatgaaattagaactatggctcaaggcttaaaagcaaaagttttagtccttaatgacaaattgactcccgtacaaattcgcaacttagaaaaattaaccaaaatgcgagttattgaccgcacggaattaattctggaaatttttgccagccgcgctcgaactaaacaagctaaattacaagtgcaactggcacgtttacaatatgaattgccgcgtctccatccctccgagaacaacttggaccagcagcgtggtggtggcttcgctaaccgtggtgccggtgaaagtaaactagaattgaaccggcggacaattggcaagcaaatttcggctatcaagaaggaattgaaggctgttgccggccaggaagaaatcaaagcggcacgacgcaaccaaagtcgcatccctaaagtcgctctcgttggctacaccaatgccggtaaatcaaccacaatgaacggactattgcgtgaattttctaaagaaggagccgacaaggaagtcttcgttaaaaacatgctttttgctacgctagatacttccgtgcggcggatcaacttgaaagacaactttagcttcattctgtctgacactgtcggtttcatttctaaactgccccacaacttggttgaatccttcaaggctaccctgcaagaaacgcgtgatgctgatttattaatcaacgttgttgacgcctctgacccgaacatggtccaaatgattcggacaacacagaacgttttggatgaaattggcgttaaggaaattccgatgattaccgcctacaacaaggctgataagactgatcgcaattacccacagatcgaaggcgacgacattctttattccgccatcgatccaaaatcgatcaaactactggccaacttgatcaccaagcgcgtttttgccaactataaaaagtttgacttgatcctgccactaagcgcaggcaaggaactggcttacctgcatgatcgcgcccaagttttacgtgaagactaccaagacgatggcgtccacatcgaagcgaacatcgcgcccgacgaccaaggacgctttcgtcaatatttggcctaactcgattaggaaaaaatatgaaaaaacataatctgctgttcctttttgccctcacatttttgttagttcctactaacacgcctgtaatggctgctaaatatagtgctagtgagtcaaaaaaggtgcgcacttttcaaaaaagctatcatcgtttgagccagaagaattacaatcagactacgctctttaccgtgcagccaaattttggtattcctttttcagcaggagtgcttgaccctgattacatcaaaacttcaatggcttatgtcaattattaccgctcattggttggactgcctgatgacgccaattatgctaatgataacgttaacgcacaacttggtgctgcagcgctagcttcagttaacgcggagcaaaatctgcgagcccatggtttacaaggttacgtcaagcctggctatatcagtgatactgactgggatacagcggaaaatactacattgggcaatatcaatttttcagaatcaactagcggaaccacggctggcgagatcgttaccgatctgatacgtgaagataataatattgcaggtaatggcaacatcggtcaccgcggcatgatcctctcgacgcgagccacccgaatgggaatcggcgcagcttatggcaccgaaaacaacgtcttgtattctgttgaacatggactatttgccgatgatattttgcgccagcctgtaaaaagccgaatcgtttatccagctgccggcgtttttccttacgaattagttggtggtaaaacgccatggtcttactcaacaaccgagcgaatttctggtcagccgaaaatttacatcacggatttgaccaccaagaaaaagcggcaagcgacgcaggtgcgcaacttcggcactgctctttatggtgacggctacacaacgacaatcacttaccgacctggcaaaaccaagttgatcagcacgcacaagtaccgtgtgcaaatcggcaaacattatagctacagtttcaaatttttcaggcaaaatagcacattgaaaaataaacagattgtaaagcatcgaaaatgaaatacgttgatatgcaaaacggctcaagcagttgtacatcctgcttgagccgttttagatagtaacaaatattgtagtctgttcaacaatcttcatgtaaaataatactcaggtctattgcagcggttagctaccgctaagacttagtaattttagcatggctacacacccctcaagattttttaagttacggaggtggaagcatgcataattgggtagactggagaagtaggcttacaaatgattgcttgggctattgcgtatgcgataacaaaaaaagctaatcacaaggattagccgaaacaacagtcatcttaagttacgattggagttagcgaccgacactcgctagctccttttcttttattattttaatatgatttagaatttattgcaatgtttagaagtgcttattctacgccaatgacgtaacgcatgatgaatcaatagcttgttgtaccaagcataattgtgcttcatataattataggcggtggcaaagttatccaattgtcccgccgcgataaattgattgcgtgtccaatgccaatcctgagtaggataatacaaaattttcactcggattacccttcctactgtaataattgcccgatcatgatgataacgcgtgcgagcaacattgaggtagctaccaattaaagtattgcgccagtatcgattatgcagataatttttctcccaaagtaaggccttgcgcaataccttagaaatgcagtaccattcgcgtttgccgttaggcaattcaaccaaacaccaaagatattggtgtctcttcgccattcaatccaccccttctaattaatatcggctttaattataccgctactagctattcagttagaaaatcaataatgtcagaaaatattaggtcatgatgtcaaatctattcaactgacatcatttgtcctaagaacgcatttaccgcttgcttaatatactcgctgcaaaggtgagtatactgcgttgaatttctggacatggctctgcttaaacggtcttgatgggtgtcattttaatccttctttaatttttactataattttctccacactgaaaactatggcaaaaaaagtagaatttttcagtctagggaaaacttttatcaatacaaaaaagcaagcgcattaatcgcctgcctaaaagtattccaaattacttctctatagtactctcttagcaattgatggtgtaaagtaactcgataccgtttgcaaaatagtaccttgctctggtgttgctgcatttacatattgattgtttcctacataaattgcaacgtggtatggagctgtcgttgaaccccagaagactaagtcacctggctgcaagttgttcaatgaaacagtttgaccaaccttaacttgatcataagttgttcttggtaagttcacgccagccgctttttggtaaacatattgtactaagccagaacagtcaaatgaatccggaccttctgcaccccagacatagttcttacctatctgttgtttagctagcgcaacaattgaagcggccttactagtagcttgcgttgaagaagtttggttagtattttggctagtcttcttgattgccgtattaacaatttgcttagccttcttcaccttagctatcttttcagccttcttctgagtagccgttttagtagctactgccgctgtcttcttattaacagtagtctttgtctgcttagcttccgttttcttaacagttggtgcttgcgatacttctgctttttctccagcagtaacatctacggtataacgcgcttcaatccattcacgcgttccaaccttgtaccacaagttgcccttcttatcgagtgcagtctcagctacattccagaccgtgccgtccttagcacggtagcccatgaattgaccattctcatagttggtccaaatattcaggctcttacctggtaaatagctaatcttaacttgcttaatcgcagtaaaattagctgcacgaacagttttcattgatgtgattgcggaaacacccgtaacggtcagggctgcagccgctcccactttaaaaaaattatgtttcataattgaatccccttggtagcgaaacaggtgaaaacttttcacctaaaattacccactcttactatgtaacgccttcattattgcatgtcctacctcaagaagcaaattagaacattacaatattacaaaaaagacggatcactggaatccgtcttcattacttactatcttaatttaaaacacgcttagcaacacttgggtagaagtatgaactcaaagtttgcttgattacgccttgacctggtgtagcagcgtggatgtattggttgttaccaacatagatacctacgtgatatggagcacttgcactaccccagaaaagcaaatcacccggttgaagattatccatagaaacggttgatccttgcttaacttgatcataagtagttctacccaacttcacgccagcagcgttagagtaaacatattgtaccaaacctgaacagtcaaaaccgttagttcctgtaccaccccaaacataggacttgcctaattgtgctgaagccaaagtaataactgctgaagcatcaccagttgcttgaactgacttcttagcctttttagctttcttaactgcttgagccttatctgaactagcatcaacagtatattgagctaaaatccattggttatcaccaatttggtaccatgtacggcccttcttatcagtcttggtgtcaaaaacattccaagtagtaccatgttgagcacgttgaccagtaaagtggccaccattgtagttgtcccatatgttaattccataacctgcaatgtagttaatctttactttggtagtagcagcttgaacagtagcattagttgaatctggcttgatgacatttactgcagctacaccggtcagagttaatgcagcagctgcggtaacttttacgaaattgctcttaatattcatcaaattctcctgtatgttttcactatatctataagcattcttagaatttattacttaagctggtaacgaaaatattaattcatcgaaaaatctttaaatttctttaatgtatttaacaaaatctataataatgccccaatgttacagtagtgttacaaaagtaatactgatttaataaatattacgtttccgtcaaaaagaaaaatagctagggagatttccctaactatcttaactagatatcttatttttaggaagactaacgcaattagtcgattacacgcttagctgatgatgggtaaaatgaagctaaggtttgttgcttaacattttgaccaggagctggagcgtgaacaaacttaccgttacctacgtagatacctacatggtagttaccccagaataataagtcacccttcttaagcttcttagttgaaactgaaatggtcttaccaagagtaatttgaccgtaagtagttcttggcaaaattttgttaattgcattcttgtaaacgtagctagttaaacctgagcagtcaaaaccgctaggacctgcagcaccgtaaatgtaaggcttgccgatttgcttcttaacaagcttaacaaccgcattacgctccttagtagtagctgattccttcttaactgaacttgaatcaggattggtagtttcaagatctgaaattgagttgttagtattgatagtagtgcttgaaacatcatcagcgtgaacagctggaacattgatcattgaaataccggcaaagaatactgataaagctgcggtgtattttactaaagtacgtctaaaattcaaaattaattgtctcctctaaaaattactaaatttgtttttgatttcttaaatcagttgacggtttatataataccgactgaatgttacacgaatgtttcaaaagagctaccatcgcgttaagaaacatgttaaaaaaacagattttatgtaaaaaaaggagaagcaaaatgctagcgaagctttgctacaagggcatcgagcgcgtttttagtttctgttaaattgtcgttaactaagatatgagcgtattgcttcaaatcttcaggtaaagcatttaattcactgccgctaagtctttctttaatcttggatggatcatcgccccgctttaaaaggcgctgttttaactcttctttagtagaagttgtaacataaagaaaataagccttgtcacctagctgtttaatgtaggaataaatgcccttgatatcgacaattaatgaaaccagatcactttttttccaggccagattcaaagcttctcgacttgagccatattgataagagccgtacttaatatgctcaaaaaagtgcagctgggcaaaagtttcatcggtttcaaaatgataagaaacattctgctcctcgcctgatcgcatcggccgcgtggtatgcgttaatacgcgtggaataccatatttttcagttaaatattctgaaacagtcgtcttgccagcaccactaggtcctgcaataagaattatttttttcaaaacctgattctccccacttgaaaatgttgcttttttataatagcattcttgtgttataaaagactaagactttttctcggaaggaagatacacataatgaaaaaagcagacgtaaaagttggtgcaatcgttggtgccaagtcagaagaagaacttaagaagccattccaaggcaaagttgaaaagatctacgaaaattccgcattgcttgcaattacttcatacgatcccgttgacaccactgctatcagcgacttgaacaataagatcgtagttaacttcaagaatttaaagactgctcgcgctgccaagaacagcaagactgcttcaactaatgaagttaagattgaaaaaattgccaagaagaacgacgataaaaaagaagcagacaagaagtaaaatttgacaaaaatagcccgcgcaatgtttacgcgagctatttttttgcctaaaattaggacatcgatacgagaggaaatattttatgaaagaaaaaacgcgaactgttttattttggtttattttaatccagccctttttagacctttattggttctacaacggtaaattagcggaagttttaccatttactctacctacgattatccgaattttagctgtttttgtgattttctgtatgtttttcagtcaaaagcaaaattggcaaaaattagggcaagacaagtggttaattctatatttagccctactaattttgtattcgattattcacttaatccacgtcaaaaactttaacagcattaatcctaatgactacaattattcaaccgtaagcgaaattttttatctcattagaatgcttttacctctgatggtgatcttttttacaaaagaattgaatttcagtcaggagcaattcagacacgttatcgaaggcatcagcggacttttttcatttacaattgtcattaccaatctttttgtcatttcgcttagaagctacgagacaggcccgattagcgctaatatttttgaatggtttgttaaccccaatatcggttactcccatatggcctccaaaggcttcttcaattttgccaacatggtatcagccgtactctttatgctggtgcctctgatgctttacttcatgttcagtcgttttaactggaaaatcgtcactttgaacgtagttcaagctttagcgatgatcgagttaggaaccaaagtggccctcatcggtttaatcggtggcgtgattatcagtattttgctgtatgttttccacttatttattgttaaggatgttaacaaaaacggcaaagccattatcgtggcgcttttaatcgaagcgggcacctttgccatcatcccctttggtccagcaatccagcgctataattatgaaaaatatttggctcagcaatccgatgattctttgacacaggccaagcgagaattaaatgctggcttaaaaaaatatcctcaaggtaaacagcgcaaggaatttttaacgaatttcatcggcaatcattatcaagattacgccttaaataagaagtttgtttttaaaagctacccttataaatacgatcctgaattttggctcaaaatcatgaacgagccaggcaccgctagaatgcaaaatcgacatgtagaaaaagcgatgcttgatcaagttgtgaagactaacaataatcgactcgacaagttcctgggcatttcttacacacgagaaaccaacattttcaaccttgaacgtgatttcactagtcaaatttattcacttggttggatcggcatgctgttgttcattgggccttatgtcattatcctgctctacgctttaattaagtggctaatgaacaaagaaaagcggacttatttgatcagctcaatgttgctttcaatcgcctttatgattttcgcagcattctcgtcaggtaacgtaatggacttcttaacagctagcttcatcctggctttcgttgaaggcagcttgttagctagcgtaaccagaaaagaaaattaaacataaaaaaagttaggtagttgcttgcctaactttttcttagtttttaaacattatttttcttgcttaataaagcttgaatctggcacccgaattaagtagtaccgagttgctaaatgacctgcatgcatcccgattccattttgccaattccgcttgtacttagccgtataaattgccacgtaagcacgttgatactttttatccattttagccaattccttttttacataaggaatcttctccgcattcacgtcaagcgcagtgttaccataagcaatcgaagcatagtcactaccaatcgtgaccttgctgccatcgcgataaaaagtataagtttgtgagccatatctcttcttagcagaattaatcgttacatagcttgaatttcccgcacctgtacgcattatcagtggctcatacttcacgcttgaagtaatgcggtttgcatcttccaggtctggattgtccataaaagtctgattaaacatccaacctgcagctaataaaagtactacaatttccacaatattaagagccatattcggccaactaaagcgtttatgctgtttgataatcatcttaatccgtctttgacggatgttctggacgatgaaaactaaataaagaatgatggcaacccaaatcaggatcccaatgatattccagctgaacatatctcgccctgctatataaaacatagaaacatgcagaagttttcatatttctacatgtcagaaagaaatatattttcctttctttgtcttatttactgctgtcttcatcagtattccgatattccatctggggagtaatcgcattgactaactcttgcagcttaagggcttagccagcccattgtttttattttgttaacgctagtaaatttaatactgcattgtcatcacgatcattgctatagccacattcataacaaatgtattcattatgcttggtgccatgttttttattgccctgcagagtaattttgtctgcaccagttttgacatagccacaattggcacatctttgtgttgatggatatgttttatcagctagaattaattctttgccataccattcacacttgtaagtcaagacttgtctaaacttgccaaatagtgacctttgcatgcctttggaggctacatgggtcatcatcatttgtttgacattcaagtcttcaatgacgatttggtcataattgtttacatgctcagtggtaaatttttgcaaaagatcattctgaatattggctgctttgcgataatcacgctgaagcttggttctcacttgcaggtaattattgctttggcttgccgatttaccgttaactcttctctttttagacaatactctttgataatgcttgattcgcttgtacagtttctgtagttttgctggcaaaacattaatcttgccttcagtgtagttgaaatgcccaacgttgacatcgatggcggtctttttgccagttttagcctttagtccagcctcttcttcataggaaagggcagcgtaataatgtcctctttctctaaagatgctggcaattttaacctcttccatctttaatgcctcgtatgctggaatatcaaaccaagatttaatccctctaggcttatctaatctaagcttgccattaattatcttggcgcgatcagttttaaagccttgacgtggagctttcttagatttgaaatgcggcttgccccaatcaggctgggtcttgtcaaagaagttcttccaagcattagccagatccttgactgctaattgcagacagcgagcagacaaagcaaattgccaatcagccttgttattgactaattcatcccacactcgatgctcattaggactaggattattatccttgtctaaagtccaagcttcatacatgtcttgccaggttgctaaagctagattccagcagtatctgcgatagttacaaagacgttcaagttctctttgcattatcttatttggccttaattcgactacctgagttttgatcatttgtttcacctccaatgcaaacataagtttagcaaaggatgtaacaaaaacaagcgaacaaaatattaaatttttagcagcagttaatttgcttctatgttttgcctttctgaacaaattacctgtatctttttctatattgccattaaattctatatttcagctaaccatttaatcctcctttttttcaattatatggtaaaaaaagcaaaatttgaataggataataattgaatacttagttaaatagtgagaagatcttactagtacattagatttattagggaacattatggtagcaatagctttttattcaattactgggcaaacggaacgttttattaagaaaactcaactttcggcccatcaaatcgacgatgccaaccctaagtatgatatgggaaaatcttatatcttaatcgtaccctcatatcaggacttcatgatggattcagtcgttgattttttaacgtataaagataacaaaaaaaatattatagggattatcggttgtggcaaccgaaactttaacgacctctttgctcaaactgccaaaaagatcacggcaacattgaaagtgcctattttgtatcttttggaatttagtggtactaaccaagatgtcaaaaatgtacgaaaaatcgtacacgatctttctgctggtgagagtactaagcaagtccaaaagcctaaggaattacgtgggaatatcagctttttgagtgattttagagattaaatatgactgaaaaatattacaaagcaattaactggaatgacatggaggaccgggttgacaaatctgcttggtcccgcctgaatgatattatctgggaaccccgtaatgttccagttagagaagataaaaaagaatttttacaattagacaagccggtgcaagatgccttgcttcacgcattcggagcactatctttttcatctggactccaaatgaaaaatgggctagagcaaattaaggtagatgccatcacaccagaggaagcagctgtgctgaatgccttgcaatatttggaatctattgccaataaaggctacagctacgttatcaacgagttgacggactcaaatatagcaaaagacgttattaactgggctgatgacaatccttacctgcaaaagaagattcggattttgaataaaatctaccaaggcggggatgcactacaaaagaaggtagctaacgttatcctagagacagctctctatcattctgccttctacgctccgctttatttattcggacaaggcaaaatggtacgaacagctgaaattgttaagttagctttacgtggcacttcatttagtgggatttatcctggttacaagttccgcttaggctaccaaaaattaggtaaaactgagcaagcagagctaaaagaatggatcgataacttgtacgatgtgctaattgataatgagaagaagcacattgagttaatgtacaagggcactgactggatcgatgatgttacgcactatctctactacagtgtcaacaaggcctacctcaacctaggtttttcagccaagtatcctgacacttctgattcaatcaaccctattattgaaaaaggggtcatcaagaatgcagtgcttgaagacttcttcttctacactaacgatcactcgctgactaagtttaaagaaattaaataattacaaaagacgcaatcgaaaattcggttgcgtctttttttacttcttagtagttttcttggttgcctttttagtagcggttttcttttctgcttcctttttttcaggcttcttatattcacgtattgtggttagcttttcaataattgcctccaccagttgatcaacaatcttcgctggatcttgttcgatctctacttcactggctaattgatcaattctaaagcctgaaacattaacgtattcagagcgcgtttcaaagtaaacatttaaaggatattccttaccctcttcaaagaagttagcaactcgtttgtaattgctataaggcaaattgataatatttgtctccaaggcaaaagtagccggccgctgacccgtcactgctagttgcgtttggatcaatgaattatgcttaaaagcagcgataacttccttgaccatcttttcagcatacggcttgattttgctcttcgacttgctaatgtcggcatatttaactgtttcaagatcttgaatataatcttgattttcaattttttcgttgagatcttttaaattaatttccaaaataaactttcctttttcattggttataattacaaaatactacaaaaaaattttttgtcatcctttttaaggattcaattcagtatttttagctttttatttgttaaaatgacactatgaaaaagcaaaaatttgatcttaagtatttatttttactcattcccattacgttaattctcattataggattgatttacctttttaacaaaaataaaatcgataatgaaattaattggatgacaatgaaggaagaacagcggctcaatgtcccgctagaaaatcaactgcccgatctacccaacggctgcgaggttactagcctatcaatgttactgaattactatgacattaaggttaacaaatatgatctcgccgataatattgctcatgttgattctttcaccgacaacggtaaatatcgcggcaaccccaatcaaggctttgtcggccatatgtctgtcgctaatgctggctggtgcgtttatcatgggcctttatttgacgttgcacgtaaatataccagccacatagaagatgcctctggcagcaattttttagcgattctcaagttaatctccgatgggcatcccgtgctgatcattaccacaaccacttttaatcatgttaacaatatgcaaacatgggaaaccaatactggtaaagtcaacgttacaccgtcatcacatgcctgcgtgatcacgggatacaacaagcaaaagaagcttgtctatgttaataatccttacggtattaaaaaccaaccggttaattggcataacttagaattgagttatgaccaacaaggacgccaggcactttacatcaaataacaaaaaagggcaagccacgaaggcttgtccttttaactcaaggcacatgctcaaagcatatgtggacgtttaaactgttcacatcagtgcgtccaacatcagcacttcccgtgcttgccacttaaggcggatgtcctctatctcataaatatacgcatctcgcgttcattaatcgactcgtcagtcagtaattgtactattttttatgtttgatgtacagtctagcacttttaaaatgacgatatttaaatttataaaaaacttcagtacacatagtcgataacatgaaacctaaagcaatagcaccagtaacaattgctactcgtagaagcaaattctctccttgactataatcccccacaactaaagcacgtactgcttgataagcaggcacgcccgggactaacggtactaaggcaggaatattaaagaccgtcactggactttttttaatgcgtgcaaaacacaagcccaaaatacctatcaaaaaggcgccaattaaatttgaaatcattcgcccaaatccccaattaaagcaagtccaatatgccatccagcccactgtgccactgactcctgacaggtgaagatcgcgatgcggtacattaatagttaatgcaaaacccaccgaagctacataagaaaaaatgacattaataataatttctaaccaaagtggcatttttatactcctatgaatttaagtacaagtgcaactccaccgcctaaagctaaagcggttaacacagcctcgcacattcgcataatccctgataataaatctcccatgaatagatctcgcaaagcattagtaattgccaagcctgggactaaagtcatcagagcgccgatcaaaatattatcagtaatcatttgtggattaaaatgattgaataatactgccaagatccccatgaccattgctgcaattagctctgataaaaaacgaatcttagtatattttttaaactcataatacgaccaaaaaccaacagcccctactaaggcagcacctgggaaatcaacccagtcgtaattatccataaacaaaaccatcaaggtagcagacaatacagcagctcccaatacctggagccacattgggaaagtaggtgcttgtgatactaaagcaatcttttcttttaattcagaaagagtgatttttttaactgcaaattggcgcgacaagtcattaacccggtctactaattccaaattgatgttgcgatcacgaatttgtttcatctgacttagcttgccaccatctaagctcatgaaaacacaggttggcgtcgcaaaaacacgcggatcatcaattccggcattgcgagcaattctgagcattgtatcttctacccgatacatttcgctcccgccttcgatcattagtcggcccgcagttaaacaaatatccattacttcttgataaaattggacatcccgcttctcagacatagttttagcctcagttcatagtttcaatatcgatggtcttgtcgacccaatcaccgcggaaaaagtcacgttcgtgactaacaataatgactccgcctgggaagttaacaatcgcttttctcaaagcatccttggtatcgttatccaagtgattagtaggttcatcaaggaaaagcaaattagctggttcaaactgcatcttagctaattttactttttcctgttccccaccagaaagttcctttagtggactcattgcttgttgtgcagttaagcccatgcgtgccagcgcttgtcgcaattcctttggctttttgcgttcaaattcttcttgtaaatattggagtggagtcatgttgctattaggccaggttagatcttgcttgaagtaagccaactttgcagtaacagataactcatatgaaccataaattggctttaattgccctaacaatgtcttaagcaaggtagtcttaccaattccgttaaaaccagtaatcgccactttttcatccccaccaacagagaaattgaaggctgacttgaccaaagcatggtcgtaaccgatgaccaaatcttgcgtctgtagcaacaaattagaagcagtcgcaacatatggaaattcaaagcgtgccttgcggttgttttttggcggtgtcaaaacatccatccgcgccagctgcttttcccgtgacttagcactcttagcacgtgtacccgccttgttcttgcgaatataggcctcagtcttagcaatcttgcgttgctggttagcataagccttcaagtaggtctcacggttggctgctttttgccgcaaggcttgcttcaacgttcctgtataacgagtaattgtgccaaaatcgatatcgataatgcagttagtgattcggcccaaaaagtcataatcatgactaacgacaataaaggctccagcaaaattgttcaaatagtcaaccagccaatcaatatgtgaaacatcaagatagttagtcggttcgtctaaaaccagaacatctgggctttgcaacaacaactttgctaaaattattttagagcgctgaccaccagataacttagaaacatcgtgatcatagcctaaatcagctagtcctagtcctgaggcgacttgttcaatttcagtatcaatatcataaaaattattttcttctaaataagtctgtaccttgccggctttttctaacagggcttcgtccccgttttcggcatatttggcatacagatcattcaactctttttctttttgaaataattgatcaaaagccgtccgcaaaaagccacggatagtcacaccaggtgccaatttagcatactggtccaaataaccaacatcaattttattttgccaagttacttgaccatcatcgggcaaaatttcacccgttaaaatcttgattaacgttgacttgccaacaccattttgaccagtaacccccatatggtcttctttgttaagcacaaaattggcatcttcatataaagttttatcaataaaactctgacttaaatctttaacagttaataaactcatttttcatcccctattatttagctgattcatgttctttttcataattttggagtgcatcaagaacacgaggccaatagcgcttaggtaagatcagttgcaaacgatcatgataaataggaaaatcacttgcttttagccccgtaatcttagctagctcctgatctgtcagcttatatttataaacaatacgcttaatttcgactgatgcatgtcctctaaaataggataggccgaagaaaaagatagcaaaaacacttgctgtaatgattgctaattgcaaattcatcctgaagctgtgtagacaaataaaaatcacggcaataaaagaaatcacagctgagagtacaccgtaaataactggaaatattgattctttttcttccttttgcataatcttttcctccctaattgagacttagtaactttacgaacttagcaaaaattgttaaagtttgcaagatacgacgttttcattattttttacataagttaagtatacttagcaaaaatgaaattgcacgaagaaagaagaaaaatgagccaagaaaagcaaaaatactattttttcccacttcgttttcaacaacaggacttaaagattgaactagttttgcctcaaattacgcaagctgaggcactttatcaagctgttgtccgcgatcgaaagcaattaggtcaatggctagcctgggctgatcaaatgcactcagctaacgatgaagcaaaatttattaagcaaattcaaaccaaaatgtcccagcagactatgctcgtgctcactattttagtcaatggcgaacctagcggcatgatcgacttgcataagctagtgccaaataaaaaagccgagattggctattggcttgctagcaagtatcaaggccgcggcattgttactaagagtgtaacggcgttatgccaatatgcctttagtgaattgaacttgcaatacattgatctgctcgttgccgttggcaatgacaagagcagcaatgtcgcaaagcgttgcggttttaaattaatggggattgagccaaaattaattaatggctatgacggccaaatttttagattaattcgacgttaaaactactttgttagcttgtcattgcgttaaatattaggtagactaataaaacgagtgtttggaatcttaatactttactaccaaaacaaactcaaatataattatgttatacgatgcttagcatcaatgagtggtcggctcatggtcaatctgattctaatgcaggacataagggcctgacgggtcgcagggaccaaaataaacctgatattatatatctaagacataagggcttagctggtggcagacaccaaaattaaaccgacttaagagttcacgagtttgtgaactcttttttattggagaaaaaagagatgaatcgcaacttatttaaaaacgcaaatttaaaagaaatcggacaattacgtcgttatatgtcgattatttatgataatgctgacttttacagcaaacactttgtaaacaaaaccattatctacactactaagaataaaaaaaatcgaacttactgctagaagagataattttatgcatttgtgtggagtaacgtatatcgacggtccaagaaaattttttaatgatgcattagatcaaaaaatacaaatcaaaaaaatacttataaaaaaagatgggtctacctttcaaaaattacaaattatgaatcaatttcaagaaatgcttggaccacatttaagattaacaggacccagtaattttacatatttaaaatttgatcactctatacgtaccaacaaaagcatactagctcttgcactattaaataatcaaaactacatgatacctatctctttattaaatctaaaatttattcatccttttccaaatggagaaaaaataataaaaatagaatctcgagatctaaaaactggtaaaattactattctcaactaaaaccaaccagtcagatctttaataatgaaaaagataattggaactaacaatgatggtaaaaaatttagcgttttaacatcacgaatcttcaataaagctaagccagagcaggcaattaaaaagccaccaacaatggaaatctcagttaccaatggtcccgtaaaaaagctagccgacaaaaatttagctaccaggtaaatactaccctgccagcaaaatagcaccggagcaacaacgagcatcccccaaccgaaactagcgccaaaaaccatcgaggtcacaaaatccaacgtagcattagtaaacagcatcgtatagtcgcctttaactgccgcaattactggccccacaattgatagtgctccaatacaacaaagcaaaatttcagtggccagccctttacctaagtttgatttacctgttttttctactaagcgatcaaaatggccagagatatcccaagccgtgccgcacaaaccaccaagtgctaagctaacaataaataaaacaggatagtgactcttgggcatattattagtaacattctcccagccaatacctaaggctgctaaacccattgcaataaagagtacatcttcaaatcgtttattgattccttttttcaaaaaacagccaatagttgttcctactagtaaggctaacgtatttacaattgttccaatcatccttctcacctcttaagattattttaccgcagaaaaaaagtatccttgtcggatactctttcatttaccagtgaaaatgccaaccgctacttgaactggatgatgaacttgaactagacgagctgcctgtccctgttccttcaccataaccagaattagaaccgctggctggcttatcctgattttgatcataaatctgatagtttgtaaaagcctgcggatcatcccacttaatgtgattgttctgatcattcaactcattctgccgtgtttcctcgttattaagcgtttgggtcgataaattcaaattcttgcgaattctatcagaagtcttttgcaattccttagttgaagcaacttgaattgaggctccatcaatccaggcatcatgaccttgaatatagctactcttcatatttttcatacagccacgataattcaacgccaagcttaacatatcgttgaaggtcaaattagttttcacatacttattaaagacatcaactagcttgcggtaattgctgagcgtattaactgacatggccttgtgggcaattgcctcaattacttgacgctggcgcatctgacgaccatagtcaccacgtggatcttcttttctcatccgcacataagctacagcatgccggccatttaagtgctgtttacccttgtggaaatcacaccagtcatatgaaaagtcaaacggcacattcacatcaacaccgcctaccgcattaaccaagctcttcaatgccttcatatttacttcaagataataattgattggcacattaagcatggacgagaccgtcttcatacttgattcatgtccgccaatttcataagcagagttcacccggaacataaagtatttgtcacctggatcgcctttaatatctgctaaggtgtcacgtggaattgaggtaatcgttgccgagtttttttgcggattagccgtggctaaaatcatggtatccgaattacctcgatcatgccgtccttcaattccttggtcaactcccaacactaaaattgaaattggctgtcgattaacaattttagcggaagtagcagtattaccgccattcttgctatcaatcacactgtggacagtaaagtacatatgtgcggcccaagctacgccaaagcaaacagctaataaagctaccacgcccactagccgagccagaaagttccctggcttcagcgctggcgcgtctgccgcaaatgcacgattacggtgaagattaagcgatgaacgacgagcacgataatcttctcttcgttttggattttggtccattcttttgatcttttcccttcgaaattaatacaagttagtttatttgtatcacttttcgtctctagataaaataaaaataccgatacgcgtggtgctagttaaatcgttttagttaataaaaaagtccaatcttgttagactcgacttgtaaatagtaataatagaaaagagtctgatctgattgaactgccttaagcttaagcgttttagccaccatttacaagttagttttaaagatttagtgataatttgtcggcactggtatcgtttgtatgcaccggctgagtttactcatcggcgaaatattgatcaaattaaaactacggacagtctgattttggctttacttatctggcaagctaagacaggaattgaatcacaaagaagattctgtgaatgtttcaattgtttatcacactcacgttttaatcgacgttcacgtcagctattgcaattgatttatcagatacggcaagaaatgaataaaaaggttgacctgaatggacatttcttgatcattgacagctttccggtacctgtttgccaaccaattcgcaactatcgtgctaaaatttttcgcggttatgccaacattggttataaggccaccaagaaaatttacttctatggtttcaaagttcatgtcattgttagcgatgacggttacattcttgattatgtcgtaacaaaagcatcagttcatgatgccagggagacagttgaactgctggaaaatacccatccatctaattactatcttcttggcgacgaaggctatttaggcaaagaactgcatcaacagctaaaacaaatgggttatgaactttggacaccatatcgtaaaaatatgacaggagctaaaaagcacaatgatcatcaattgatggctattcgcagaacaattgaaagcgacttttcgcttctgacctattacaatgccgagaacaatcgagcacgtagtctgataggctttcaaagccggttggaaattgcaattttagcttataatttggcttattgtctagaacgatttaactagcaccacgcgtataccgataattaataataacttatttttttgcgaaagatagcataacaggctaagatgtatacaaattgaaataattatggaggaaaaatatggcgataccaaacagaaatgaagtcccagaagaacttaagtgggacttgacccgaatttttaaaaatgatgaagaatgggaacaggcctatgcagcggcccaagaaaaaatcgaccaacttggtgaattaaaaggtacattagcaaaatctggcaaagatttgtacgaaggcttaactaagattctggccgttaagcgcgaggtggaaaatatttatgtttatgccaccatgtctagcgatgtggatactgccaattcacattatttaggctatgtcagccgggtgcaaagcttagctaaccaattcgaagccgctactagttttattaacccagaaatcttgagcatccctagtgataaactagctgaatttaagcaagctgagccaagactaaagaattatgctcactacttggaaatgattactaataagcgacctcataccctgccagctgaacaagaaaagttaatcgctgatgctggagatgctttaggcgtttccgaaaatacttttaacgttttaactaactctgacatggaatacggctacgtccaagatgacgatggcaacatggaacaactatctgacggtttgtactcattattaattcaatcgcaaaaccgtgacgtcagaaaaggtgccttcgacactctctatgctacgtacagccaattccagaattcgctggcttcaaccttgtccggcgtagtgaaaaaacacaactataacgctaaagcgcacaaatatgactctgcccgtcaagcagcactggctgaaaacggcgtacctgaagcagtttacgatactttaattcaagaagttgattctcaccttgacctgctccatcgttacgttgccttgcgcaagaaaattttaggcttaaaagatttgcaaatgtgggacatgtacgtgccgctaactgggaagccttctctttcttataactttgaagaagctaaggaagttgctaaaaaggcattgaagcctttgggcgaagactacttgaagcatgttgactatatttttaataatcgtgtcatcgacccaatagaatctaaaaacaaggtaactggtgcctactccggtggtgcttatgataccgatccttatgagttgctcaactgggaagataacatcgattcactttatactttagtccacgaaactggtcactccgttcactcctggtacactcgcaatactcaaccttacgtttacggcgactatccaatctttgtggctgaaattgcttcaactactaatgaaaatattttgaccgaatatttcttagaccacattaccgatcctaagacgcgggcctttatcttaaattactaccttgattcatttaaaggcactttattccgtcaaactcaatttgccgtgtttgaacaattcttgcacgaagccgatgctaatggagaaccactgaccgctgacactttagacgacgtttacggtcaaattaatcagcattattacggcgatagcgttgaaccaggcggcgatattgcccttgaatggtcacgaattccacacttctactacaatttctatgtgtaccaatatgcgactggctttgcggctgcaacagcattagcaaacaaggtggttcatggaacgcctgctgagagggatgcctaccttggctttcttaaagctggttcaagtgattacccaactgagatcatgaagcgtgctggcgtagacatgactaagcctgactacttagaagatgccttcaagacttttgaaaaacggttgaacgaatttgaaagcttgattgagaaataaataatcgcgctcatataaaaataatcgatatcatttcgtgagatttgatatcgattttttgttgatgatcttgatttattacttggcatatttatcgctcaatatgtataatacgtatataagtattatagtgccagaaaaggtgaaaaatatggctgaaactttatataaaaaggtcgttaaaaatggttcttccttagctatcaatatcccagctaaggaagtaaaagagcaaaatctcaaagtaggcgatattgttgaagtaaaaatcaaaaaatcagaccgtcctaattctgaaaatttaaaagaaatagatggcttaatttctgattactgggatatgttagagtacttaaaggataagtagtcaatgaagatcaattatctaacagaaaaggatattttagtaatcaatgcaagggttattcaaagagaaggtgcaacgggacaaaaacctcacgttagggatgcagaagcccttcattttttagttgttcaacctaagcaaactagttttggacaagaattatatccgtcttttgctgaaaaagctgggattttattaattaaattagttaaaaagcatgtttttgaagatgcaaataaacggactacagcaattgcattcttactatttttacgacgcaattcttatgaactaacctgtgattggcaagatttagcaaatcaaatcttaaagatcgctcaaatagatgacaatgaactaaattaccaagaaatctatcaatgggttaatcaagtaattcatgaaaactaaaaataatcgatatcattttcgccctaatattatattttatatgaaataataaccactttataaaaaaataagggctattaacccttattcataataaatccatcaactatttcctatgtcatactactactcgattgtcctgcataaccagctagtgtagcctgcaagtcatgaataactttaggagcattaaaatttttagcaaattcgtactgttgcaattgataatataatctagaaccgatatataaagcagaatcattattttccgcttgatcaattgttctatccaaaattcttaccaaatttggattatcaattacatctttactaaaacgaactttttctagttcattttttaactttaaagtctcatccttcttaatcattatttacaccaaaggatgcgcaaatggtccatccttctgccatccagtatacataatacgaccaacgctatcccacatttgtgctaaattatcatgacaataatatcggttgcaatatacaccattaccatagtaatggtactttccgcctccgcgcttgtgatgtgtaccgcctaaaacttgacttaattgattttcttttagttcttgaaactttaccattccagacacctccgataaatctttaagcctgcctcacttagtacttctatcaacttacatatataagtctaccaaaacagtagtgttttctaagaaaacgtcagaaactggcaacgttcatatcatattctgttaaaatacataatttgatcaagaatttagtacctgtcgatttaccaatcaaatactccagttacaataccgttagcacccactgctgcatatctttctagtttcagctgaagttcaactatagctttaggtagttcattttcactaaagttttctttcaatttcaaagacaaattagaagcaatcgattgaattgactcatgcttatcagctttcgcaatagcagcttgtaataactcaaccaattcggcatttttcttaacttgaggatctgaaatcactgtattcaatctactcttaaatgcagcttcttctttaagattctttttaaagaacatatttatctccttgtattaaccttgatttttcagaaaatcatacaactcagtagctgtttttcctccacctacccatgcgttagcaatttcaccgtttttaattcgcataacagtgggagtacctggcacttccaagttatcaaaagcataatctgcattatctttactttcatcaatatttaaatagtataattgaccaccaatcagattattaaattcatttaaagtggctgaatattgtcgacaataatagcacgttgggcaaccaatatacaaatatctatcaatattatcttttttatcgaaaaaagaatctacttcatctgaattaagagactgtaaaatattttgtgtaaggatgaatgattccttaaatttatttctttaaacattagaaaaaggagttcctttctcgtatgattggtttgaacaaaaaaacacatacagaaagaagaactccttcatgaatgattttaccaaagattttgctcaagctctattcaatccagacaaaataaatgatttattgcgcaaagagctacaacaggctgttaataacttgttagaagctgaattgactgcctttctgggctatgatccctatgccagaaatggctggaatactggcaactctagaaatggtgcttatttccgcaaagttgatacgcaatttggcccaattgaagtgcaagtgcctcgggatcgcaacggtcaatttcatcagcacacgctgcctggctacaagcagcactcggatatcttggaaagcatgattatcaagctttactccaagggcgtgaccaccagggaaatagccgatctaattgaaaagatgtatggcagccattacagtccagcccaggtatcaaatatttccaagcagatgattccaaaggttgaggcttaccacaaacgcaagctaagcgacaagtttttctgcgtctatttggatgcgacataccttcctttgcgccgagaaacatttgagcgtgaagcagtctatattgccattggcatcaagcctaatgggcacaaggaggtcattgactactgcattgcacctagcgagaacattgaagtctggacagatatgcttcaaaacatgaaatcccgaggcttaaagcaagttgagctctttctttctgatggtgttgttggcatgaaagcggccttgaccaggacttatcctaaagctcattttcaacgctgcttggttcatgtcatgcgcaatatctgtgctaaagtccgggtggatgaccgcgaaaagatcatgaacgaattcaaacaggtgcatcaacagacaaacaaagaagaaaccacagctgtcctgcatgacttctataccaaatggggcaaggtttacagccatgttatcagaagcttgaaagacatagaaccagatctgctggtcttttataactatcccaagcagatcagagcttcaatttattcgactaacatgattgaatcatttaacaatgtgatcaagcgcaaagctaagcctaaggcagagtttccaactgaacagtcgcttgatgcttttattggcattcaggcaatgagctacaatgaccgttatttcaatcgaattcataaatgctttggtcaggttcaggacaccttagaatcctactttgattaaataaataattaaaaaatcaatttacgagaaagatctatttacacaaaagatttgacagtttcaaaaataatattgcaccaatatttgactttatccttttatctctttttataaaatatgagaataaaagaatacatatgacttgaaaaatatctactacgaagtcatttattttagcggtgaagctagttgtaaaacaagctaaaacaaagaaaatcgtaaacactaaatcttttttttggaatttccaattagataatttataaaaaataaataaatctactattggtgaaattgatccctgtatcgctatcattactttaatccaagaaactttttccaattaaagtgaaacaatgggtgttttgacttattaacaatattattcattgcaaacaaattttgattaaaaaccatattagtaatagcaaatccacctttaacctcaactagctcttcttcattcaactttttcattatttatgcttcctttcaatttaatgcactaacaatttttacactgttaatgttactacgagcgcaactttatgattaaaatcgtcatattctgtaccatttagatcatattctgcattttcaattaaaatgctcctccaccagaaccatttccccaactattcgacttcttcttgaaaaaatagcgtttagattttgatcgtccacccacaatttagacatgaactagatagcttccgcatattttctcttcccttcatttaccattttgttacaaataaaagcataactctatctagcttctcaaaattaagctcatcagattttgcattatcctaatcatattttgctaaaaataatcaatcctctttctcctctggccaaaaaagatcatctaatgtcttatccagcgcctggcaaatcctgatacacaagttaaccgacgggttataattacccttctcaattgcagaaatcgtctgccgcgaaacatccaccttctgcgctaaatcttcttgcgtcaaatccttaccagcccgcgctgctttcattcttaaatttttcactctacatcactttccttatcacgatgaagttggaacaaactcaccgtcccaacaatcagccaatagatttccataatagtcatcgcactattgaaatcattgagatatcccaggatcaagcaaacacctatcgcaatatctacccggctattggccttaatatgttcttcattgaatgcaaaatatgctccatgtagtatatcgtagactgacatcactgctaatgccaacatgataattgaaaaattaaccgcaattccgtgctgagcgtaaaaatctgtctgcatgaagaaaacggagagtacttcgccaacaatcaaaaccaaaaagccgtatctatcaccacgtgcacgaattaattcttggcgctcatcatacttggctgcccgataattccccgcaaaagtaactactaagatgaaagccattactgcaaataaacttgcaaaagccataaattttaacattttacacatccctttctttatgtgcctcattctatgatctatttttagcaatgtcaggtctgttttacattattgatgatttatttactatgcataaaaataatcggtatcattttggcgaatttgataccgattatttgtttatgatactgatttcttctttgttaacaacaaataattttcaaaatttacttgacatcttttttgatcgtcgtattataatgacaattaaattaataaaagcttagaagagatgagtaattacttaagacttctgcagagagtcggagttggtgcaagccgatgtagtcgatagtaacgaatatggtcttggagctattttaaagagcaagctattaagtaagcaatttacgagtgacgatcgttaccccgtccgagtattcccaattttgggagcacttagtaaggagttagttgtgaagctaacttgaatttgggtggtaacacgcttaggcgtccctagcatagaaattctatgctaagggcgctttttattttgcttatttaatttttcagaaaggagccagacaatggataaacctatcaaaactacaagttcacaaatcatcatcagtaaaaaggcattcaaccgaatgtgcactattgtctggttgatcttgatcatcatcggacttttcatcgttaaataaaacatcgaagcaaaactaaggagaaaaattatgacagaattacattacgatatcgttggtagctttttaagacctgcagaattaaaaaaggctcgcgcagaatttgaagaaggaaagattaagcaagaagaattaactcatgttgaaaataaagagatcagagaattagttcaaaaagagattgatcatggtcttaaaatcgtaactgatggtgaatttagaagaagttactggcacctcgatactttctggggctttgggggtattaaacacactaagcaggcccacggctatttcttccatgatgaagaaactcgtaacgactctgcccaagttgaaggtaaaatcaaatttactggtaaacatccagatctttcatcatttgaatacctgaaaaaagttgtcgatgaaactggcgctaacgtaattccacggcaaagtattccagctcccgcacaattttacgcagaacttgttcgtggagaagaaaatattgccgcgcttaaaaagatttatagctcagaagaagatttactcaccgatatttctaaagcataccgagacttaattttagccttatacgatgcaggatgtcgcgacattaaactcgatgactgtacttggggtatgattgtagataagcgctattggaaaagtcatttacaagatgacttttcattagacgaccttaaaagaaaatacttgaagcttaacaatgatgcaatcaaagatttgccaacagatttgcgaatatcaactcatatttgtcgcggtaactatcactcaacttgggcagcccaaggaggttatggtctagtagcggactatgtttttgctaaggaaaatgttgacgccttttatcttgaatttgacaatgatagatctggcagttttgacccaattgcacaaattcctaacgacaaacttgttgtcttaggtttagtaactagtaaaaaagcagaattagaagatccacaaaaattaatcgctagaattaaagaagctgctgaattccacccactaaatagtctcgctttaagcacacagtgtggcttcgcctcaactgaagaaggcaacacgttaaccgaagatgaccagtggcaaaagatcaagttggttgtcgacactgccaagcaagtttggagctaaatggcaattaactagttaaaataaagataaatagatttagacaaaggagaaaaaaatcatgggaaaagttgaaagttttgaattagatcatactaaagttaaggcaccttacgttcgtttaatcactgttgaaaaaggccaaaaaggtgaccagattagcaacttcgatttgcgtttagttcaacctaataagaacgccattcctactggcggcttgcacacgattgaacaccttttagccggtcttttacgtgaccgcatcgacggctacattgactgttcaccatttggctgtcggactggcttccatcttttagtttggggcaccccatcaactactgaagttgccaaggcacttaaggagtcattagaagaaatccgtgacaacattaaatgggaagacgtaccaggaacgacaattgaatcttgtggtaattatcgcgaccactcattattctcagctaagcaatggtcaagagatattttggctgaaggcatttctgatgacccatttgaaagacatgtagttgaataaaattttgactgtataatcaaaaagctgataattcatttttacgtgaattatcagcttttattttgtcaataattattactggaacattcatcataattactccagcaatattaggattgcccaaatccgcttttgccaactgtggagaaaaatcttgcaaaaagtggaagattatacaccaagtcaagccattggtccaaatgtgcaaataactaaaaattaaataccctagtagtgaaactaaaatgtttagcaaccacagcaaaaactgtaacgtacgctactaagataaccgttgccataacgcgctgatttttacccaatagatttaataagactgggtaaagctgataacatagctgaagcactacttccagtatgattaatccaattactgcttttttcacattatccttattatctagttcaacttcatcagctaatgccaaataatacttatctttcataagttcacccattatttttttatatccattgttttatgaaattgaaatagtgatacaacaaaaatccagtcttgatctgtaatcaaaattggattctaaggtatcctgaacctgatcaaagcctttgtggattcgattgaaataacggtcattgtagctcattgcctgaatgccaataaaagtattaagcgactgttcagttggaaactctgctttaggcttagctttacgcttgataacgttgttaaaggattcgatcatattggtagagtaaattgaagccctgatctgcttaggatagctgtaaaagaccagcagatcaggttcaatctctttgagatttctgatgacatggttgtacgctctgttccacttgtcatagaaagcgtgcaagactttgatcgcggcttccttatttggctgttgatgaatttgcttgaattcattcatgatcgtttcgcgatcatctacgcatactttagcgcaaatattgcgcatgacatgaactagacagcgttgaaaatgagctttcggataagtctgctccagcactgtcttcatgcccacaacgccatctgaaagaaagagctaaacttgttctagaccgcgagacttcatgtcttgaagcatttccgtccaattctcgacgttttcgctgggagcaatgcggtaatcgatgacttccttgtgaccattaggcttgatgccaatggcaatatagactgcttcacgctcaaacgtttctcggcgcaaaggaatgtaggtagcgtccaaataaacgcagaagaacttgtcactgagtttgcgctgatgataggcctcgacttttggaatcatctgcttggagatgttagagacctgagctgggctgtaatgactgccatacatcttttcaatcaagtcggctatttctctagtggttacgcctttggaatatagtttgataatcatgctttccaagacattggagtgctgcttgtagtcagggagcgtgtgctgatgaaacatgccgtttcgatccctaggcacctgaatttcaatctcgccaaattgcgtatcaaccttgcgaaaataagcaccattgcgtgaattgcctgtattccagccagctctggcataaggatcatagcctaaaaacgcagtcagttcagcttctaataggtcattaactgcttgctggagttcttctttctgtatgtgtttttttgttcaaaccaatcatacgagaaaggaactcctttttctaatgttttaagaaattaatttaaggaattatccatccttacacaaactattttacagtctcttaattttaactgtgaaaaaatagactatcattgtagaaatataaatatatgtagtcaactctacaaaaattagtccatttttattcattaataagttgtaaatatgacttttgttcataactatcagtagggcaaaaattattccaagaataagtgatagcaaataaacatcattactaaaaaagctaagtctggatccgaaaatagtcataattattgagcaaaataaatcaattaatccaaaaataagtgcagctccccaaaaaagcgtgttagctttactctttctacttattttgaaataaaagaaaatacttaagatttccaacaaatctgacacaaattcatttatatatccatttgcatcccctaaggataaggctacaaataaaatgataagaaaaatatccgcatatttatatttttgtcttgcaacttgataaaagatccataaatcaaataaaggtgatacaacagcttgtgttaataaaagccacattagaacttcctactttagatgtaacatccacttaattaaattgtgtctatgcttacttgtaaagttagtaacacataaaaaactaacagtaggatcagcaaatccacccttaacttcaactaattctttttcatttaacttcttcacttaaacttcccacacgcagaatcgctccttttattgtgattctgcgttttttaacaaatataaaaggcacatgaccttttcattgctataattaaagtgaccaaacgataattctatgcatgaaaggcttgtgccaatgtctattttaccatctcctgaccaaaaaaatgaacaactattttcaaactgtaagtgtcaatgtttttgcggtagcctttaaaccattagtctaaccttaatttcttaaatatttatatgacttaaatttctgcttagcttgcttaaataactattgccagctacctgtgcggttaatgcgccatgctggatgcctaaatgaacttcatgacgcttctttaagctgtcacgggccgctgcttttaattcctgttcagtcaatacagttatttctgaatcttcaaactcgctgctaagccaaaattccagctctcgattcttgatgcagcttaagatcctaagcatgccttctgctccagattttgaccatttcttgccttgccccttaacacggtaggtatacttgcggtggttgctctcgcagcagccaatggctttagtcacagtcagttttcgtttcttaaacggcttaatatcgtcccaatgacgatcaatataattccttaggcgccccagataatcatgattgagctcggtattcaattcatcaattagtcggctttctgcagtggttaggatagttttaactttgtcatagctgtatttgtattccaaagcagaaatcagcttgccttgcaggtcaggcgcaaaatatagcctttctttgattttcttatttaggtgaaagacatccaagaaatgctcatgacgcttgcatagccctacaatgtcatcgaagtctgttttggcatatccagcaccgccatcggcgttgctaagaattacagtatcagaaagatcataagtattggccaggtactccttggcttcgttcagcgcatcaagtcggcttaaagaaacaaattccttggcattgattcgctttctgcgtttcttgcttatattgacaatgccttcacagacctgatagcgatgaaattccaaccggcttttagtgcctttgatcaccacgccatcgccttcaagatacaaaactgggacctttttcttagtgcctgcggcatcatatcttgaatctgcttcttggcccgctttaatatttttcccggccatttttaccaaattgcccacctgcatatggctaatattaaagccagacaggcaattgactgctagagcagtattgcgataagtggcaacgctgcttacttctaagatgtttttgactgctaaaatactgtagcgcttgtatttgtcaaagcccattaattcatccaagggataccttgcttgtttgcctgggcagacatatcttcttctgacatacctaacttcgccaaaagccatattgattgagcgctcattcttcttatcaatctgatagccctgtgctttaaccttggtaatcatttcatcatcaactttagctaaagccaaggccatgatttccttaatcaggtttaagaagaaacagattatttttctttcacgcttaatataattatcttcagactttataatatttgcgatttcagttacaattgaattcataaaagaccagcttctaatgtgttttttgttcttaacatcagactactggtctttttgtttgagctcaagtccaaattcaaaggacttgggcttttttaattatttattcaacttaccgtaaaaaattatacacttagtttcaaactcaatcatcagcttcatcaagaagtttcaggtgatcaagctgttgagaaaatgtggcttccgcaaggaaaaaggcattagcctgttcagcttgtttctttacgttttaagcaatgtctttcgtgaccgcagcttatatatgcagctgaaaacggatcattttaaagaaagcttttctaaaaaatgcttattaccgatttatgcgcaacgtccacgtcaattggctccacttcaccacactgctttctgcgcaaatcattaataatcacttgcgatctttgacttcagaaaaacgggctgattgctttgttgtcgatgattcctacttctctaggaccggcttcaagaaaacagaattagtcgccaaagtttttgaccatgtatcaatgacttacaagaaaggttttcgcatgatgaccctgggctggactgatggagcttctttcatgccaatcaattcggtgttgctgtcctctcacaagctacagaatatgattggcgaaaacaaagtctgtgatcagcgcaccattgctggcaaaagacgcatgcttgcccggactaaaggcacagacgtgatggttaatttaatcgaccaagctatgaaagcaggtcatcaagccaagtacgtgctgtttgacagctggttctcaaatccacatcaaatcgtccagctcaagcaaaggaagctggatgtaattgccatggttaaagttagctccaaaatcaaatatgaatttgaaggagaacgcaaaaacatcaaacagatttatcgtagctgtaaaaagcgacgcgggcgttcgcgctatctgttgtcaattccagtcaaggttggccgccaagacaaagacggtgctaaaattgacgctcggataatttgcgttagaaaccgtgccaatcgtaaagagtggctggctattatttgtaccgacatgtcgcttagcgaagatgaagtcattcgcaattatggcaaacgctgggatattgaagtttttttcaaaacctgcaaaagctacctaaaactaagcacggaatatcatggtctgtcctacgatgccttgactgctcatgtggctatagtctttacccgctatatgctcatgtcagtagccaagcgggacgacgaagatgagcgaaccttaggtgagcttttctattgcatgattgatgagctggcggatattacattcagtcattcacttcagctaatcacaaaagcaatggtggctagcgttgaaaaagtctttcatgccagtgaagcacaaatagcagaattcacggctgactttatcaatcgtttacccaaatacatgcaaaaattgttaaagaaaactagcaaaaatagtatagaagcccaaagctaagcaatatcaaagaattgccagcttatttgatgtgggaagtttaagttcttcataattcaaatcttcctttcaactctttaactttttacatcaccaatattactatgcattcaattttatacacaaagtcgtcatattctgtactattttaatcatattctgcatttttatttaaaaagcacctccaccagaaccatttccataaccatacgaattatttttaaagacgcggcgtctaatttttgatcttccaccaacaactttcttcaagactagaatagatagtttttgcataatttttcctctctttttctcaaaaaatactatagaaaaacatacacccatttggactccaaaaaacatttcatcatattctgcctcatttcaatcatattttgcaaaacatcaagttactcaatatgagacgcttctttcaattttatttaaaagatcactacttcgagtcctccatcttttcggtatcattttagctcatttgataccgctaaattaataatgataccgattaaatactaaaaaagactgacaattcatttttacgtggattatcagcctttttgattactcatgataaatatcttgaaccgccataccccaatatggaatatattccatatatcttttacttgcattcttatcatatggttttattaaatacgcttctaaacttgatgcaattgccttagatacttgagaagcatctttatctgataaattaaaggttttacgaattgaagagttactaatcttcatgtcatttacatatttcaaactagcatcccagtaaattgattcattcttttcagtaatagccaattcactaaatgctttttcctcacgaatagttacttgcgtagcagtggtacccttgcttaaaatttcgaccgttggtaaatgagcctcttctaatgaataaaccactttatcaattccagtaccacgtgattcagtaatatgaaatttacttaagatattagccaattcaggattacgggatcgaggtgggacgtctaaaaatctaagtggttcaatcaaaggaattcctggtgctgtgcttgctggtagtattgatttatcatgtttgaattttttaagacaccattatatacaaatttccagcaccaaaatcagaagatgtcgtcactgctatcttatgccagctaacattgccattcattggttgaggaacttggctctgtatcacctcagaaaaatccttaatttgatgtagattcaactcatttttacgtgaattatcagcttttatttatatctaaatcattcctgcaattaaaccaactacatataagaagacacagcaaactactaaatacaaaccgccccacttcacggtctctttcagtatttcgccttcatcaccttcgcggttaattgaaccagttgccacggcaatattttgcggcgacagcatccctgccgttgcgccagtcatgttcgatgctacaacccagtacttacttacacctaggtccattgcagccgacagttgtaaatttccaaagagaacgttagctgaagtggcagaaccagttaagaatgttcctaatgccccaataagtggtgcaaataatggataagctggtcctaataagctaactaaggccactgctaatgcatcggtcattcctgcatagaccattactttggctaatcctacaattgcacaaaccgtaattgttgtcttccagacgctcttaattacttgtcctaaaatttgcatcattttcttaaaactaacgccctgaattgccccaccgattaaagtagcgacaaaaagcaatgtacctggagacgacaaccagctaattgacaaggtattcggatttttccccgtataaacaaccaaattagttgtcaccttattaagtaaattattaactgctggcaccaatgatgatgcaaaaataacgaagatgaaaactaagataaatggtgaacatgccttgagcatttctttagtacttggtttttctacatcaggttcttcttcctcatcatgccatctagttaataaaatcgtaattgcgattgaacaaagtgccccaacgattgctggcaattctgctccaacaaacttagccgcaattacttgcgggattgccatgcctaaacctgacatcaaggtaattagtccaacgcctttaattgctttaatagaaccttccgttaaaattactaggataaatggcaccagcacaactaaaacaaataattgcaaggtcacgatgaaggataattcttcttgctttaacccagtcacttcacccaaggtaatgatcggcaagccaattgcaccaaaagctgtggccgtggtattaacaatcagactgattactgatgctctaattggctccaagccaaaggcaatcaaaatcccagcggcaatcgccaccgcggttccaaaaccagcaattgattccaaaaagccaccaaagccccaagcgataatcaaaacaataatccgcttgtctgttgaaatcgtcgccagcatatcttgaatggtcttcataccacctgattcggtagtaacattatacgcaaataaggccatcacaattacgaacatgatcggccaaatgcccatgataattccttctagcgccccacttgccgtatctagcaccggtaatttaaaactaaagactgctaacaccatcgtcaaaattaagccaatgacacaagcgcgtgcagctggcattcgcataactcccagcgaaataatcaaccaaacgatcggcaacaatgcgatcgcaaatctaatccacatcaaagtcctccatcatcaaaagtgttgtactatattatttaatcatgatttgggtaaaaagttaaaataagacacaaaattttagttaaaattacaattttcacaaatttcacttgcaagttttaccaacaaactatataacaattaatggaaagtaaaatttctcacatcatgtttgaactactccgtggaatagagtagttctttttttgcgtaaaaaaatagccagaccgaattcagcccaatgtcattaagttaagacattgacaaattatcgacttggacttttaagatcattcatttgcgatttatcgcatttgaatgatcttttttcatgccaaataaacccaaattttgtttagaaattaggctacacgatataaataatatacagctgatttgggtttgagatttcttttgtcttttcgtcctggtctgatcggaattgtgtaatgactaatttgaataagaatctttttaaagatttcagttgaagaagaaattatatacatagcctggatgacaaaacatgactgtttgaaattgatcgcatattgatacttgcagtttttttgtggtacatatgcttgagcatcaatttgactgactgcgttaaacataatcatgtgggcatagatctccatttcaataaatctatcctgcttggaatgaaactgtacgctacctaaagcatatttcaactttttgaatgaagtttcaatgccccagcgcaaatggtagatctctttgatcctttttaagggataatcggctctatttagattagttagaacaacttcccattcttctttgcctgatttaggatcattaattctaaatttacaggcacgaaattttattgtacataactctccaaagtcccagctgccatctttggtatttttagaccgatattttatatattgacggtaatgatggttaaccaaatgaacgttttctgtagccttatgggtttcataataataattagaggtagtcacccagcaagctatatccttatcacactcttgattaggcaactcagctacttccttaaatgcgccatatcccgttttagtacgtatgacataataacagttaggcaggcgattacaattttcaatcatgttaaagccggtataacctcgatccatagtaactatatatggtccgcaatttagctttttaagcatttgaacggcggctttacgttcatccatctttgacttaggctgaaagatgcagtcttgataagtattatttaacaggtcatagagtgcattaacatgaatttggcaatatggctttcctttatgattgagatttccaacgatattctctgatttaggattccagatttgattaaaatcagacccatcaatggcaaatatacgatatttatgatcaaataactggatattaaataaattctgattaaatacagttagaatatgcttaaaacatgcgggtgaaagctgacctttgcgttggacataagcggaagtactgactactttatcgttatttttaatagctttttggccaaaagctctaaacaactcactggtcaaatcttttccttgcatattaatagtagttttaatgactgtagctgcatctaaaaaccgcttcctagtgaaggcatgagtatcatcgataaaatcatgaatatgctttccagtatcattgataatttgatcaagacgatctaaaatatttctgtgaagggctttcataattaacaccagctttctggcaataattttgaaggtttaataatttaatcagagggcgaaaaggtaggttcttttcgcctttattttatgcaaaaaaagaaccaaatcataatgattcggttctacagagattagattcaatttgtcaatgtcttaacttaatgacattggaattcagcctgacttctgtttttttagcgatgtttaattacgtgaataccataagcgattaagtaaattaccacttcgatcgttgcaataaagaaagttaccggccagttggtgataaagccgagatacagtccagcccacacgccaactaaagcgaaaaacacggaccaactgatcattgctggtattgttttaccaatatagcgcgccgttgaagatggcaatgttaatagaatgaagactagcaatgaaccaacaatctgggcaccgatagcaactgacatagccaaggctaccaagaaagcaataccaacccagccagtatgtacaccatgtgcaacggcaccgatatggtcaaatgagtcaaaattcaagcttcgagctaccaaaataattaatagtaaaactagaattgacaaaaccactagctgaatcacgccttgtttatcaacaccgatgatactaccaaacagaatattagtagcgtaacggctatttgatccagaaatggctaagaacagcacacctagcccaataaacagagctgagatcgcactaactgacgattctttttgatcgctgtgcaaggacaattctcctactccaattgaaccgagcaaggtaaatagtagcatcccccataacggtgcaatgccgataaagacggcaaaagctgctccagcaaagccgatttctgacagtgtgtgagctaaaaaagcataactccgtgctactacatatacaccgaccacgccacaggtaatcgcaatgaatgtactagctaagaaggcataacgcataaattcgtattgaaacattattcgaaatcctccttaaatttatccatctttccttgcctgatcgttctcttatttaaatatagataatcagtcatatactttttagctaaaggaatatcatgagtgacaaacaaaacggtaattttgtgttcacgattcaggtgcttgattaatcccatcaattcttccttagcagccggatctaggctagctgttgcttcatctaagatgatcatattgggatgatcaagtagagcctgcgctaaatatgcacgttgtttttgtccacctgatgcctcacccattcgggtattctgaatcttttctaaatgagtttcttctaactgatgatcaatctgttccttaacctttttggtcttaaacaatggggcgttaagtccaataaatgcgcgaatcgacaatggatactccgcatcaatatttctaaactggggtacataacctaacttaacgtctgaatcaaacttaaagttgcccgcagtcggctttaacatccccattaaaatcttaattaaggtggtcttccctgttccattaggtccaagtagtgcagtcattgacccgtcttcaagctgaaaactcaaatcttgaaaaacatctttagtatcaaatctcatcgagagatcatttacttctaaaatcactcttctaccccctccctaagttgctattatttttctattttagccaaattttgataattttctttcatccaagccaagtaagtagtgtggttaggaatagtctcccgcacatttaacactggaatattattttccttagctaattttacaaataacttcacagttgaactgcttgcctgtgtattgttaacaaagaatgcaatcttttttgctttaatttcattattcatttgattaatcatcttaggactcggatcagtaccattctcaattgcttcttcaaagcccttatccccaatcttgtatcctgcttctcttaaagcataatcaaagacaggttcactaacaaagactggcttactatttttcttattagtcttcaccaattgcttaacttgattaatcttagctaaatacttgtcaccattagctttaaaataagctgcatgctttttatcaagcttagataaacgcttaactaggtaattaacatacttggttggcatacttagattgtaccaaatatgcggattatcccccttctttaatcccatcaagtcttcaccaactaagacaggctttttgctaacagaactagctagcttattcatccaagaatcatagcctaagccattagcaacaataatatttgccttggtcaattctttagcatctgccgtagttggttcaaaatcatgaggatcggtactgctattgctaatgattgccttagccgtaccatattttcctacaacatttttagcaatatctgcataaacattggtggtggtaataatcgagacttcacccgaattgctcgtcgaatttgatctattcgagcaagctgaaactaacagcgcaataacgccaattagtcccaaaaaagagattaacttcgtaattttagatttcgcattttgcataaaatatcctccttgtgcaaaataaaaaagcatttaagttagaaaattcagcataaattctaactaaaagttagaataatctagttaattacatatgtcaacatatttttgcatagacaaatagcaccagtctcccataagcctgatgctatcaataatttaagtcataaaattttgctgaattttattaaatgctttgttctaaaattacattattatataaacatatttttatataattgtcaaactaaattaaaattcttccttcacgtgctgacgcaaaacatctaagattttaatcacatgcttatcttctaagctataatagcgctcctgcctaacccgctcgctcttaactagcttagcctcttccaaaatacgcaagtgacgcgaaatagctggctgactaacatcaaactgcttaactaaattattaacactacttttttgattatcatttaaataatataagatttgaattcgaatcggatgattcaacgctctagtaatccgaataatttgctcgtccaatttcttcacccattcatactttttaatttattatagcttaaatttaggtataaaaaaacgctacccttcgggtagcgcaaaacataacagagtatcttgatttaagtagagatcatcaagatatttatattataatacgtttttgccaaaatgtattgttttttgattaataaccagaattatttaataataatattcgatattacttatagtattattcgtttgggtcttctttgacattcttcttccagaaactcatgattaaaccagcaacgattgaaccaataatagtagctaggaagtagaataagatgtggcttggaccaccgatgttaccagcaagtggtgatacccaaagaccaccgtgaggagctgggacaccaacgtgccataaaccaactaaagcaccaccaacagctgaaccaatgatacatgatggaattacacgacctgggtcagcagcagcaaatggaatagcaccttcagtaatgaatgagaagcctaatacccagttagaaacacccgcacgacgttcttctacagtgtacttgttcttgaagaatgtagtaccaattgcagtagcaaatggtggaaccataccacccaccattacagcagccatcaagatagcagcagtagctgagtgagggtcgttagcaaatgcacctgaagcgaagacataagcagccttgttgaaaggaccacccatatcgattgacatcattccggcaaggatagtggtcaaaagtaccaagttaccagtacccattccgttcaagaaatgagtaatagcaaagttaatgccactaaagattgggttaatgatgtagaacataattgctgcaataaagagcaatcctaaaattggatagaacagcattggcttcataccttcaacagaacgaggtaatttagcaaatactttcttcaaaccaaccatcaagtaaccagcaataaaaccagcagcaataccgcctaagaagccggctggtgaagttgcgtgagcttgaacgttaacttggaattgaccgttaacaatagaggccatgtaaccaccaacaaaacctggcattaaggctggcaaatcaccgattgattcagcgatataggctgccaaaactggaaccatgaaggcaaatgccaagttaccagcattgtttaaaaagatgaaagcaggagtcttagcgccacccatgtagttttctacgatgaatgagatggccattaagataccaccaccaataacgaatggaagcatgtgactaataccattcatcaagttcttgtagatacctgcccacaaacctggcttctcagttgatgaagattcagttgacttgtcttgagcacttgcacggtaaacatcagccttaccacccataatgtcatcaatcaattcgcctggcttgttaattccatcaacaacaggacggttaactaagtgcttgccgtcaaaacgtggcatatcaactttcttatcagaagcgataataacacctttagcacgcttgatttcatcaggagtcaacttatccttaaccccttctgaaccgttagtttcaattctaacttcgatgccgcgcttcttaccttccttaatcaaggcttcttgagccatgtaagtgtgggcaataccgttaatacatgcagtaacaccaacaatcaatggcttgttgtcgtcatcacttgtaccttgagccttagcagcttccttagccttcttagcttcagctgccttcttgtcttcttcgtcttttttagcttcagccttttcaaaaagatcgataacttcttcaggagtcttagtattcttcaaagcttcaactaaatcaggatcaattaacaaacctgaaagttttgctaatgcttgaaggtgagtattgtcagcaccatctggtgcagtaatcatgaagaataagtgaactggttgaccatcaagtgaattatagtcaattccttccttactcttggcgaataatacgcgtgccttgttaatagatttgttacgtgcgtgaggcatcgcaattccgccaccaataccagtagttgattcgttttcacgtgcccagattgacttaataaaagcatcttcgtcgttaacgatatcagttgctacttcaaggtcagccatttctttaatggcatcttctttgttcttagccttaagctccataatcatggagtcagggcttaaaatatccttgattctcatatttttcccctcgttttttattaagaaatttgctcaactttgatttgtggaagaacagcatcaatttggctcttaactgcaatgtccttagtaaaggcagtagcagcaccacaagccattccaattctgaagccttccttaggatcttgggtcttgtagtaagtaccaacgaagccggcaatcattgaatcacctgcaccaactgagttaacagcagtaccaacagcacccttagcatggtaaacatgatccttggtaagaaggaaaccaccttcaccagccatagaaaccatcacattttgagcacccttatctaaaagcttttgtgcgtattcaagcatcacatcacttgaatcaaaagttacgccaaacaagtctgctaattcatggtggttaggcttaattactagtggcttatatgccaaagtatcaagtaaagcttgtccagtagtatcaacaacaaattctgcacctgcttctttaatagtaggaagcaatgattgatagaaatcagttggaaggcttggagtaagagaaccgctcattactacaatgtcgcccttctttaaatcgtttaaacgatccttaaaagcagtgatttcttggtcggtaatgttaggaccagccgcgttaatttcagtttccttttcagcgtggatcttaacattcacacgagtgttatctgaaatagtaacgaaatcactttcaattctcttttgattcaattgacgaaccaattccttaccagtgaagccacctacgaagccccatgccgtattatcaacatttaattggttaaggatttgagaaacgttaattcccttaccccctgctaaaaatgaatcattgttagttctgttaacttctccgcggttaactttttctaattgaagaacatagtcaagcgctggattaacagttactgtataaatcatcctattttgcctcctctaattcaataccgactggtaatgaccgtttttgacctggttttagttgatcagttaccacaatcacgtcacttgtattggcaaacacagcaaagttacgctcaccgattttactattatcagttaatacataagcgtgtcttgcctgtttgatttcggctgccttaaccgcagcttcctctggatcaggtgtagttagattgccatttttttcaattccattagcaccaacgaagctagctgaaaaattcattgccttaatctgacttaaggcggtctgacctataacagcatgcgtatcgtccttaacttcaccgccaattagaattgtgttaattccgtgatttaaactgcataaagcagtctctacaccattagtaataatcttgacgttagcaacctctgctaaaaatggtaccatctcataagttgttgttcctgcatcaatgaagacattgtcacctggacgaacaaaattctgcacggcatatctagcaatagtgatttttgcgtcatgattcaaactgaagcgaacgttttgtgatacatcacgagaaaaatgtttaactgattgggcaccgccatgaacacgcttaaggatcccatttttttccatctgaattagatctcgacggatagttgattcagatgttgcggttaagtcacataattcacttacgcgacataactcgtgttgattaacatagtcttcgattaagctttggcgctcctgagtcagcatcatttctcacctcgataaatattgtattcgctttctcctccaaaatcaatcatttttcttcaaaaaatgtcatttttatttattatcgttcaataacattcatttatatgcaaaaaagatgccgttttttgattgaaacgacatcttttcttcgtcatttggaattattcttagtcgttttaccctatttgactaagaatccgtaaagatgactaagaaagagaaccaaagatctattaaccttgcaaaagcaaaacacgctgaatcattattgattcagcgcgttttactattaaatatattttgtctagcctctcaagctacgcttaaagttttgccatgggccgacatcatctgtttgcaaaatcaagtttggatagatttttctaatccagataaatgacgctactgtagcggctaaagcaattaaagcagagatagctgcctctaaattagttgcgttacccataattactctagctggcattacaaatgatgatagaaacgggatgtacgataatactttagcaaaaatcgtatccccacctgattgcatattgactgtgaacaagaacccgatcaacatcaatgtagatagtggtcccaccgctttgttggcattctcgcttttagcaaccaaagcgccacagaaagctgcaaagataataaacaataccaagccgattatcgtaaacaccaatccccaagaagccagattgccaattgcttgatcaatcatcggcttatactgtctaaataaatcgctaaagccatcgatgtatggggccgcgcaataaactgccacaaaaccaacaacataaattaacacttgggtgataatttcaccaaaaatacctaaaatcttcccagtgaaataatcgccacctggcatactcgaaaagattacttccattatcttggtacccttctccgtagcgatatcttgtgctgttacttgcgtataagtgatcacaagcatgtacaagataatcagcaaaacccagaaggaaatttgcttaacaggatcattatcaaagctcttcttatcaacatgcttaacttgttgcttaaattgcgctcgcgtagctaaagactgagtctgttttgtcgttagcttggccttacttaaattcaattgttgctgggcggtgtttaggctagttagcagctctgattttagatcactgtccattttttcatcactatagtaagttgcagctaattgattattcttttgttcaattaaaacatagccatcgatatcttcatctttatacgcctttttagccttagcttcagtgctatagttgtcaaagtcttctgactttttaattgcttgctttaaggcagaattagaagtaactaccccgacatagttgtcatcactgccgccagctgataccattccgataacaaatgaaaagaagacgagcagaaacggtgctaaaatcatcagcaaatatgaccaagttttcacttctctacggtaggtttcttttgcgacaagccagatcttattcatgacgcgcacctgctttcattttgaaaatctcgtctaaagttggaggttcctggtcaaaagtctggatatattgaccggccgaaagttggttaaaaatatccttaccatatttttcgtctgcaagaataagcagcttcattccattgttttgcaaaattatatcttttacacctggtaaggctgataattcagtagcacttttgtctgtcctgacaaaaattcgagttaggccaaagctgttcttaatttcatttactgggccattcaagacgatatgcccatcattgatcattacgacgtcatcgcacaattcttccacgttacgcatatcatgatcagaaaaaatgatcgtagcgccttttcttttttcttccaaaatcagctgcttcattagatcaacattaacaggatctagtccactgaatggttcatctaaaataatcaatttaggttgatgaattaaagttgcaatcatctgtactttttgttggttacctttagacaaagacttaatcttatccatggggatccctttaacagccaaacgtgataaccaatcaggcaattcttcttttacctttttagccggcatccctttaaggctagccaaaaacactacctgatctgaaatagttaacttaggcatcaaacttcgctcttcaggcagatagccaatattgtcataatctttagcgttgaaagaatgtccatcaatactaatctggccgtcataatcaacgaatttcaaaatactatgaaagatcgtcgacttacccgacccatttttaccaaccagtccaagaatacgcccatctgacacactgaagctaacatcaaacaaaacctgtgttgacccgaagcttttatttaggtgttctatttttaacataatttttcctcaactttttatctaatggttattagacctagaagtacaccgtcaaagaactgccataaagtatcggttgaaaaaattgtttttacaatatcaactgacccccaattggttactaaagtaatcactacaccagctgaagcaaccactactcctgtaccaataacttgaggggcaagtttcaacactttcttctgccatggaatctttgatgcgaccgttttattaaggactaagcttgcggacatgatgccaccaaacattagaccgaaagccaatccggctccaatcgacataataatttgaaaaggttgaggcgaaccagcagtcttaacatacatcatcacaagagctaatattggtccaacaagtgctccaattcccatgccttcaataattcgtttgttttcacgagcaaatttttcattattcattgttcttacctcaaggaaattttcagctaattaaacaaatccgaaaacttagtcggaatgttgttcttggcgaagtatttcttgaatgcatccccaaaactcaattgatctttttctctattttcaagcaaatcatgaacagctaagaatgctgtaacggcgtaattaacggctaaaatgattaacaaaccgagcacaatataaattaagtacagcattgttctttcctccaattcagcgattatctcccaggaaataatcttttatccttttaaattaatcatatccccatcatttatgtaaaaggtaaaaccgtccaattctgtcatttttcggactgattttgcattttattcttcatcttttttataaactaataaatcccctggttgacaatccaagacttcacagatcttgctcaacgtgtcgaagcgaacgccatgcgcctttcctgtcttcagaatcgacaggttagccggcgttataccaactttctctgccaactcctttgaagacatctttcgcttcaagagcataaaatctagtgtcacttcaatcatctatatcaacctttctaaataatcgagtctgcatcctcctgaaccttcattccgtacttgaataccaagtagactacgtatagtactgctaggaaaagcaaaccagttgtcacaccacttgggtatagtacattattcgaggatttagcgaaccaagtgcggtgagttatgaaaataatgtaatctattattgaaataagggtatatccagcaactgaaattaataatttcttgagtaaattcaaattactatcagcaaagtaaacttcttgcttgatattcttaacaattaatctggcatatcgacagattaaaaaggctgcaacgctcatcatgatcagtgatagcaacacaaccactattgcaccgatatagttatcaactgatacgccttttatacccctaccactttcaaagccagcacgaaaatccggattatgtataccaaataacacaacacctcccataacgatccacataattattcctatcacacaaaatatttggtaaatccaagcaaaaatcgtaagcaaattcaaaattaattttttcatttttctatcctctcaaaatatggatgattctgtatatagcactgccaattacacccgttactccaattactaataatgtaattctaagaacactccatgttccgcctaagttagcaaacactaagattgccatcattatcagcattccaataattgaacctatctgtcttttcttttctggaagcatatctatccctctcttccataaaactatctatctctttctcgtcttttataattattgtattacgataatttataattgcaatacagaaataaaatatttttttgagataataaaaaaataccaaattagtcgttaaactaacttggtattatgttttatcttccaagctactgctttttacttttcttcttatagtaagagttcatgaaaatattcataaagataacaaaggctacactttcaactatattccaaaatactgttccaaagcttaatgttttgtactgaaaatagtcccataccaatcctattaacagggccaaaataccagcgatgatacttctgtttctaacttggcgctcggttaaaattttatttttcataatttttaccccattattatcatatcgaaaaataggaaatctattaaccgaattttctattttttaatattatctatgtttatgttttttatgtctattttgtttggcgaaatctttaacagcgccttctacacatccttttatcataccacttccgctagggagcgcatcaatgaaacccgataaacatgatccacctacaccaagccagttagtgccaccacttactttttctaattctttataattcatttctttcatcataaaagttacctccttttttacaaatgtgatacacaagaaactgatccgctaataatacccacattagcaccaaatatagctccacctactgtaccaattggagtaccaaatgcagtgcctgcaatgccatattttagtccatccttcaacgctcccattccaatagctttagcacaatttgtgatttttctacggcgtcttgctttaccaccgttaccaccgaaaacagctgacagttcttcataagttaaagtttcaaatttgttcatgtttttcccctttataaaacttctaattacaattttcataagtgaattaagttttacctctcttcaacttacacactaataatacaaaacaatttaccttcattggcgtataataccgatttagcacgaaacaagatctatttggaaaatatttaccaaatcggccaagttttcgtatattagtaatttacaaaggattcttattaattgttacgctaacttgatattctgttttataaatccgaaaactagtaaaaacatagacacaatgcacttattatgagaatggctaacaaaaaaatcttctcatagccaaggctacaagaagattgccatcacattaatgcataaactgatacgcacgctctttactttaataaaacatgatcaattatacgactataacatagccactcaaaaccaaaaacttgagtcgaaatcaaataatcatttttagcatagtaacctacgaaaaaaatcacaagtttcataggtttctttgcgttatcttctaagtattacgatattttctattggagatatttttagcctattcgcaccagtatttttttcaatacttatctactagttattatctacctctatgaaaagaactttggaaaaacttaggattttccaaataaacgtctcgtttatgattaccacctttcttactgtataaaggtagcatgtgttcagtatcagttagaccaatatcatctacagaacctgacccacctaaaattccgcttaaaagtacttcatctttagaaataatgattcgtttcatctacttttcctccttagttttctttcctaatgaaatgcccaaaactaaactgattaagatactaatcattccaattaattgaccccagatattatccttctcacctgtagatggtaaagactgagtagaaccatttttaatagtgtcattttccaatcgctttaacttagtaattctattttgattgttcttaacggcactataaggcttgctttgcacttttactgaatcaaattgtttattttctttcacacttccgtgtttttcactaactgctgctagaataatattctttttatgcgatttagctgttttcttgaccttagtggctacgattttaggttttactggcttcttcacagttttcttcttagtttcagctctaggagccgcatactcttgattacctgtcgtaactttagtcagatctgcagtagagctagcaacatttgcagcattctcaaatacgctattttcaacaaagtcagtaatagcaacgtcattgctagactgtgtttgatcatcttcagctacagtcacttcaggtatttcattactttcagattcagtagtattatcatccttcggttgatccttaattactgcctgttccactaatttattagctgcatcagaatacaaaaagttatataactcttgtcccgtcttttctccaccgacccatgcactaataatttttccattaataaatctcattgtagttggagtacctggaataccaatttctttgaaggcatactcatgtgctccttcttcagcatcaatattgaaataaagcagcttacctttaacgatttcattgaaatcttttaaatcaggtgaaaattgtcgacagtagtaacatgttggacgaccgatatacataagatgttcttgattatttttctctgctagaagatcttttacttcttgcatttttactctatgaaaatcttttacattgttctcataatcttcaacagatacctcatcttcatcatcttcactatcttcctcatttgcattattaggatcttgattattagtattctgtgactgattattttgatcttcagaagctgctggctcttcttcctgcttattttgagtttgagctgcttcgttcttactactagttttctgctcagattcggaaacatttttatcatcattttctgttttagatactacttcacttttattctcttgagaagtattaccttcatccgcatgcacaatagtactattcatcatcaataatactgctgggctcaacattaacattaatatttttttcttattcatagatcttcctccgtattttttataactaagaaaaatatatcaattatcagctatctttttggttatcagacttattcagtacactttttgaccaaatcagttatcaaaataattggaatttgattctaactaaaaaagagcttttcagctccttttaattttggttaagaattttatccttaaaatattcaaaatatgtactcttacctgtaataatagttgcgttgccttccatcccatatttcaaatttttcttggacttggccttacagattacttcatagacattatttccgcgtagattaatgggatatactccaatttctttcacttttcctactaatctatccattgttccactagcattagctacctgaaaatacagtgtttggcctttttttattgccccaattttattacctgggaaataagtaactacattgaccgttcttttagccttaatcatcggaaacaagtgaactgtattctcctgtttatcatcaagatgaactagccatttttctctatttcttctaacaatttgtccttcatgatagtttctattggcaatattaagtgtattttgtggttctacaattccggtagatgtaactgtactttgtctagttgcaaagaaagaaccgactattaagatcagaactaaaattgccataggaataataatcatagttgaaaaattcttgaatttataggaatagtattcggtactctcatagtctttattattcataacgttgctcctaattctcaactaagttatagtaaaagccatgtttctgcattaatttctcatgacttccttgctcaacaatttgaccatgatctacaaccacaatattgttagtcctttgtgcaattgctaaacgatgagcaataaaaataatcgttttatcttttaatttcattaaattatctactacttttttctctgtaatcgtatcaagcccgctagtggcttcatcaaaaattaaaattttagccggtgacaataatgcacgtgcaatagttagcctttgcttttgcccaccggataaaatcttggcattttcatccatcttggtttcaaactgcagtggtaattgttcgatttcagactcaatttctgctatctgacaggctttcaatatatctttttctgtaatatctggtcgactacctaagagcagattttctttgattgttcctgagaagatgtatggtgtttggggaacatagtttacgtatgaccgtaagacatgcttatctactttagtagaattaaatccattaaaagttaacttgcctttgcttggagagaagaaatcaactaaaagtttgaccatagtagacttacctgagccactcatccctacgattgccaacttatcattgggttcgatttttaaattaatatctttcccggatttaaaattgaagtgcaacactaagtgttaaacaaaaaggccatgaagacctaaacttgaagtgacgaaaaatcaagaaaggaagatcttcatgaccaattcaaattctagcatttctaagcactatcatcaattaaccagcgtacaacgtggacaaattcaagcaatgctggattccggcataacttcccgtactgttatcgctcaagaagttggctgccataagtcgacaatcagtcgcgaaatcaaacgcggaagcgtcctgcaaagagacagcagctatttattgtatgagcactattacgctgatactgcacagatttattatgagaagcgtcgcaaaaactgctatcagcgcaatccattgaagcattatgctgtctttttgagaatgctctccagacgctttaaagctaaatttgatgccaccagcatcgatgagttcgttggtgaattcaaaaggactatgccaggctacccttgtcccagcacaccaaccgtctatcgctatattgatcagggcttgctggacataagcaatattgatctgcctatgaagctcaaaagacgcaggaacaagcgtcatcacagccatggcggtcacgctttgcacaagaagcatcttggcaattccattgaacagcgtcctaaagagattgaagacagaaaagctccgctgcactgggaaggagatctggttaaaggcgtcagacgcaagaatcagcctgctttaatgactttgactgaaagaaccacacgctttgaagtagttatcaagattcctgactatcgggcaagcacatgccaaaggctgcttcaaaaggagattgacagacatcctgcctggtttaaatcaatcacgtttgacaatggctctgagtttgcggatatgaccaagatcaagggctgccagatttactttgctcacccatattctccatgggaaaggggcaccaatgagaactgcaatggtcttttgcgtcaattcttccctaagggcaagagcatgaaagacaagtcaaaagcttatgttcaacaggcaactgatgccattaaccacaaatatcgccgaatcctccaatatcacacagcagaggaactcttcaagcaatatatctcttcataacctaactgttgcacttaatttgacaattcaggaattaatatcttttaatacatcgactccatagccataatgatagtcaacatgatgatattcaatctcacctgctaattgcttggcatccctaatctgagcatctttctggaactcactcttaaccatgtatacttcattcaatcgattttgtgctacattagctgattgtagagttggttgaagattaataatgctctgaagtggatctacaaaatacgatagtaatgcgttgaaggtcattaattgaccaatgctcatctgcccgttcattacaaccttagcccctacccagaggataattacattgagagataactgaatgaaggtctttaaagctgactgcaaagattcagttttactgtaacgaaaagatttcttgaggtaatcgacgaattgactatcaatcttacgataacgtgtttgttcgctatttaaagctttgattgtttcaattccttgaatatcttcaattactgaagaacttaagacagcattactctccatctgatcattattcatcttttcaaatttcttagaaaagctaagaatcaccactgcataaattggcaaagacagtagagtaatcacaaatagagtggaattttgaattgccaaaactattcccatcacaattacaattgaaagatcaagaaataatgaaataactgtactggcgagtgcgtcaataattcgactagcatcagagaaccttgaggtaatttcccctgttctacgagttacgaagaattccattggtaattcaaaaatatggcgaatgtattgtaagttaagatcaatacttaatcgctgacctagaacatccaatagaaaattttgcccgtaagaaaagatagagttgaaaacatatgctatcaataaaccaatagctaggatcgacaaagtttggtatgtaccgctaggaatataagtatcaattaagccttgcaagaagtatgagctacaaatactaatgattgtcatcaaaagagcagccaaaataatattagtgactagtttcttttgtttgaacatgtatggaaatagtgaccacagattttgctttttctctttgagtggctcaaaatcatcatttgggaccataaaaagggcaattcccgtccattcttgagaaaacttttctttagacattttcgttaaaccaacgctaggatccggatcagcaatcactaaataatttttggttgccttaatcacaacataatagtggagtaattcgccttgctttaagacgtgtacgatgaaaggatattgaatgtctgcatcaggatcaaacaaggacatgtcagctttaactgcttcagtttttagattaaatgcttgtgctgttttaactaagcccagagcggtagtcccttctaaattagtgcgggctgaatgacgtaaatgggctaaaaatactctagaatgatattttttaagaatcatagctaagcatgcaactccacaatctgattcgtctacttgtggtacataaattgatttatactgtagtaacatcttttccactcctcatattaagttgaatccattatttcatgattggaaaactaaatgtaaaaaaataccaaatcggttattctcattaccgattcggtattttagttttctaactagattgagctactcaactttaatattttcaaatttatctacaagctttttaaccacggctttatacgatctagaataagttaccatctgaccattatcaaatataataatgcgttccttcgtgtcaattgcactaatgttcttaggatttaccaaagaagattgcgaaacttttgccaagaatgggttttctttatcaatctgagtaatatttgccttatactcaacttctccattctcagtaaccatatgtactttatgctgtgtagtactgtgttcaatgaaaagtatatcgccttcggccactttacatacgcgccgaccaatcttataagtaaagtcacgttgactaaacttaattctgttagataaattatcgaaggcgttacgtaacgtttcttcgatacgttgaataatcttatcagacgacatagacttactaatataatcaattgcaccgatacgacggcgatacgttaatggagcgtacttatcgtacgccgttacgaagatgatctgggcattttcgtcattcttcttgatgaattcagctaaatctacgccattcttagctttagactctcgacttaattcaatatctaagaagtagataccattcttaatatcatttgtgactatgtatcctaccgcttgagcaaaatcgttagcaacaaacgtaacagattcatttaattcagcgtaaccttcattatcatctattaagtcttgaatagatgcattgatattcttagcaatctgattagctaaatctttatcgtcatcgcatacaatgattgggaacttactcatcctcttcaccatcttccgtatcaattgtcatataaaagtcgaaccagccgtcttgaattgtataagaaatagacatatcaggatatttactctcaatttccttaatattagctaatccaagccctttatggtctttcttagtagtaaagccacgttgttgaatttgactagttgagatatttttattttggattttatttctgatttcgaactcaaattcatctgggtcatcagaatagaccattatttggacttcagcacttcgaatatcatgcttttcggcaatcaatgctttactttcctcaattgcattatcgaaagtaatgccaataatacgtactagatcgagttcatctacatggtctggtaaattacggatattatttcgacattcaaaattatatggtatatccaaattatacaattctgttatctttggaataataatgctcttaattgatttaacgtaaatgtgatttaggtctttatatttaagtaaggctttagaatttaggttagtttcagtatatttatctagtttctgaattacttcttgaacgttaccttcttgcgcacttacctttaaagaattaagaatatttttgtaatcatgtctgaaggcgcgaagatcatcttcacttttttcaagataagaagcatattcttcaagctgatgctgctgttgctttaatttttcttgatcctttttatttaaaagtttttcttgtaccatcgtcatttcatgatatataaatatagcaaaaatagtttggataagaatatagagagaaaagaacaaagttaatggtgtaaaagatttgctttgaatatatatgatagagatgctcaccgtagaaacataggtataagctaatatgcctacgaaaattttattattttggtttgctagataattatatatttttccattacctagttttattgcaactatcatcattagtattagtaagaaacgtagtgataattggcctatcaaagtaaatgacataacctgagtgatcatatcagacacaatatcaactaataaatctaatgtgcatactaatattattgaaccaaatagtatttctaatgtattattttttctcaaatataatacaaaaagcaaagtttcaagtatatttgtgaagattacgccaatattacctatagacaataacaaccctaaaaaaatattagcaatacacaaaaatagaatctgtctctttttagatcttactcttgatattttaaaaaaacaccatacatctgctaaactagaaaaaacattaagaaaaagaaataagactatcttttccatatattattccaaagttttttactcaagaaattaaaaccaacatgtgccgtgcttccaccaacaaccttagtcaattcttcttccttcaaaacagtctttttaacattttgcttcttcatgatatttcatcctttcatgattttatactcaacttgtttacacctttaatatatcatgtacttttaagtaaattaaaaaagataccaattcagtcatactttcgtaccgatccggtttcatatttcttcaaacgtaaacaactgacaattaattttcttagctaattcctgacagctatccgtaaagccagatttggaaaatagataataatgcttaagtggatacttgaagatttcactatttgtaatcaatttttctaacacactacgagagatcggttcattcttccatttacattcgccgaaatatccatcacgttcatcgtcagagaatcctacaatatctaactcaacttgttgatgtgttctcttatcggttccccaccaattgcccaagtggataaacggattaggaacaattttttcattcatatcctgagaccacatgaagtcttgactgtatttttcaaactcaggtcccatgaaatcagatagacccttttgtacttttacccaagcaagatcagttaagccacgctcaattagatcggtttgcttgccaacaaaggtataccagaagcggaacatcccgtcacagatacgataaacgatatttttgcttttactcttcttttgctcagtaaccggtaactttttctcaacaatacctaaatctatcaaattattcaggtacgtggttagcggaccagtttgtaagtgggcggattgcgcaattttactatgcttagaagcacctgaagctatcgcattgataatcgaattatagttagttggatcgcgtaattcctgttgtaacaagttattaggctcatcaaataagcgacctgatttactcaaaaagtttttcttaatattatccgcaactgacatgctgtctgacatataactcaaatattggggtacaccgccacaaaccgtattgatgataaaagcgtcctctttactgagttttggtaacatttcatgtgcttctgataatttaaatggttcaagctttaaggctaaagtgcgacgaccatatagtggactttggtagcctaagacttgtcgttccataaatgacatcgatgaaccacataaaatcaaaaataggttagtttctttgaattcatgatcaatgtaggattgcaacattgaactaattgtagggtaagccttagccaaataaggaaattcgtcaataactaaaattacacgttgtttttgagctaggtgtgtaatttctttaaagcattcctcaaaatttgcaaatttttcttttccaccctgatctgtatttttaaaaatactaattgcatcagaaaaacgttttagattatcttccgcattttcttcaagtgctacataataaattgactttttatcttttaaaaactcattgatcagtgaagtctttccaattcttcttcgaccatagatcactgtaaattgaaaatcattttcttgatacgcctgattcaattgctctaattcttgatgtctacctacaaacatagcgcactccttttcactacatcgtaatatactacattatattatactataacacgatatagtataacgtaatgtacgtgtattctatttttgtaataaaaatggccgttacttagagaaatagcgaagatcattaaattttaacatgctataataacaatagaacaagaataaaaagttttagcgtgcgcgttgaggtagctcctcaacttagtcattaacgtgtggctctgctttggcaaagcttttttgttatgttaataccctacaaaagtgtctgggaaaaaactaagtctcagatcatgaaaaaagaacgttgaatttttgtttcaacgctctttttgtatacttttagctccagccttgatattattaaatcatcacaaaataaaaaaggtggaaactaacatgtacaagaattatatcacaggtcaaactgctttaacacttaatctagattttgccattccggccaatcatttggctaatgtcatcagctggtttgtagattcaattccagaagatgttttagtaggcaagactgctaaaacgggccgcccagcctatcatccagccatgatgctcaaaatactgctttttgcttactccagaagagttttttctggcagaaagattgagttgatgctggaagaaaatctgccaatgatgatcttggctgaccagcaaaagatttcatatcatactatcaataattttagatcaagcagccatgccaatgaactgattaaaaagagctttatctacttcactaacctgttagaagatgaaggcttaatcaatgaaggtgctgcttttatcgatggtactaagattgaagctgatgctaaccgctatacatttgtctggcgcaaagcggttgaaaagtatcatgaaaagctgaaaggccaggcagttgaactttatgatgaattgattactaaagaagtagtcaaagaaatggaaaaagaaaaagttcaaactagtcaggggctaaaggaattagctcaagaaactgaagcagaaattaacaagctgactaaagagattgagcaggaaaacaaagccattcctggcggttcacctcgaaaagccaagcgacgtggactaaaaaagattctgcaccggctaagaaaagattatgtgccaagaatgcaaaaatatgaagaagccgaagagatctttgccggacgcaacagttattccaaaacagatcatgacgccacctttatgcatatgaaggaagaccacatgaaaaatggtcaattaaagcctggctacaatattcaagcagtcacgaccgatcaatatgtagttgattatgccatctttcctaatccgacagatttcaaaactttggagccggttttggatcaaatgaccgtgttggacaagtttgacaaaatcgtcgccgatgctggctatggcagtgaatacaattattcgatgctggaggaaaaatatccagacaagaagtactttattccctacactatgtatgaaaaagaacagaccaaaaagtataagaatgatccaactaagctaatcaactggtactacaatgaaaaagatgattattacattgatcatcatggcgtcagattcaatttcaaatattacagccagcgcaaggatcgttctactggtcaggtccgtgattttaaggtttatgaggcagacgagttccagctaacgccagaattggaacaattggctaaaacagctagcggccgccagcgccaagttcgctataatcctaactggcaatatttaaaagaaaaagcaaaagaagttctccaaagcgaagaaggcagacacatctatggcatgagaaaatatgatgtagagccagttttcggacatttgaagaacgtatttggcatgcgcagaacgcacctgcgaggtaaagagaaggtcgaaaccgatatcggaattgcctttatgatgatgaatttgaacaaatattgtcaaagaaggtggctgaagggccgatttttattgttaaaaattttaaagagaacaaaaaaacgatcaagattcttaaaaaaggaaatcttgatcgtttttattcatctggaagctagttttttcccagacacttcatcttatcacatctattttctaacgtattcgccgttcttgtacttaaattcaatcttcttgttaggcaattgaaccgtaattctgcgatatacaggaccgaagccgtgcttttcaagcttaactttcacgctaccgtccttgtttaccttaaccttgtacaagttgtattcgcccttttggtacttaaagtcagttccgttatcttgatagtgaacgtacttaccctttttaccaaatagtctaaaggtcatactctcgtctggttcaccagagatgtggctaacttctttaccccatggcaagatagtgttcttcttgataaacagtggcaacttgccaattggtgcatcaaccaaaatcgtggtctttccagcatgttcaacaccattccagaaatcaatccattttccttttggcaaatatacggcacgcttggtttgaccttcttgaacaactggggctgccaaaatgtcctcgcctaccatatattcatcattcaagttatacacctgtggatcattttcataattaaggacaagtggacgcataattggcaaacctgtcttagtttcacgatagaattcatcgtaaagatatggaatgaaacggtaacgcagcttcaagtacttacggtaaattgacaaggttggttcgccaaatatccatggttcttgtgagcgagttcctagagccgcatggtttctgtacaatggactaaacaatgcgccttcgatccaacgagtcaacaattcaggtgttgtgtcagcaccaaagccaccgatatcagtaccggcaaagctgaatccactcatacctaagttacataattgtggaatcatcatttggacatgtgtccataaactttggttgtcaccagtccaaactgtggaaaacttttgcgttcctgcatatgctgcacgcgtaatgacaaatgggcgttttccactgaatttcttcaaaccttcataagttgccttagccatgttatgaccatagacattgtgcatcttcttatgagttgaagcttcttcttcattatggaagacgatattttgtggaatttcacccttgaaggatgcaggttcattcatatcgtcccagatacctgaaacaccaaggtcaactaagtacttgcagttcttagcccaccacttacgtacttctttgcggccaaagtctgggaagactgaatcgccaggccaaacttggtttacataaacagtgccatctggagcctttacgaagtagcccttttcgataccttccttgtagatcttatagtcatcatctttcttaacgccagggtcaataatcgtgattattctgaagcccaatttacgcatcttagctacgaatttctctggtgactcatagttatcttttctccaggtaaatactctgtagccgcgcatataatcgatatccaggtgtaaaacgtcacatggtaagtcatacttacgcaagttttcagcaatcttctcaacttgcttttgactgacactgtagccccaacgtgattgttgatagcccaaagtccacttttgtggcattggtacacgaccagttaaataagtgtagttagtaataacttccttgagtgagtcaccaccgatgatgtagtagtcaatattgccatcaaccgctgagtagtagtaatagtcattactttccttacctaagtcgatgtggttgcgataagtattgtcaaaaaagataccgtaaggatgaccattttttaatcctaataaaattggaatcgacttatacaaacgggtaaagctctctacttgcggatcaggattgtcagtattccaattatcataagcatagtggcgtttgttcaaatagccggttttatcacccaagccataaaattcttcgtcatctgctagtgacttgaccacttcataataatcggcgtcatgctttcccagtaatttatccacatcatggccttcagattcagccagcttcaaatgttcctcatccatctgtcggtcaattggggttcttttcccccgataatctacgaccaatggattgccttgttcatcaaagacgtcaattttttcatcatcataagcttttactatcaacttagccgtagctatttcaatatgatcgcctttatttttaactgtaaaatcagttttaatttctttatcgccttcgatagcataagaattgctagcattacctcgatcttgaaagaatcgcataatttccggtgttaacacggtcaaaatcattggtccattctcatagtttaaggtaattttttgtccatctttagtaaaatcagtaagttgattaatcataatttacctctaaaaaatcaaaagttatgtattcgctttcaattttaacacaataagctaatcaattgggtcataccagaaaaaacaccttcagaaatttttgtatttaaatacaaaaaaactgccttacggcagttttatttaatttattccattggaaaaatcttatctggattcaaaacataatttggatcaaaaacatgcttgatctttctcaaaagttcagtgtaatcatgaccatagaaatcctcaaaccaatctttgcaggcataaccaataccatgctcgccagacatatttccatccaaagctttagctgtcttataaagttcggtaatcacataatgactcttttgctcaaactcttcgtcactcattgcatctgagcaaagataaatatgtaaattaccatcgccggcatgaccaaagttaggaattcgcataccaacctcttgttccaattcatcaactctatgcaaaacatcaggaatatgattaattggcacacaaatatcaacttcatccatctttggcgtagacttttgaatagccaaaagcaatgcttcccgacaagtccaaatcttctttgcttcctctgaattagcatctaaaattaccgcatcagctgctttaaacttcttcgttgctgcaagggcaagctttaattccgcatccaattcctctttagttaaagaatcaagccctagaataatgaagccatcgccatttgcaatcgggaatttttcatcgtaatacttttcccagagactaatgacttttctacccataaattcaacggttgttggcactacaccagaagccaaaattgctggtactgatttaattgctttatccaaattaggaaacggaataattgcattgatcgattgtttaggacgtggatataaacgcatggtaacttcagttactacacctaaagtcccttctgagccaatgatcaggtcttttaacgaataacctgatgaggacttaactgccttagcgccaaatttgtaaagtttaccatcagttaaaacaaccttcaattcgcggatatgttctcgagtaacgccatatttaattgctttcaacccaccggcgttagtatccacattaccaccaattgtagcccaatgcattgctggagctggcatataagtaaatggtttattggctaaatattcttcaatatctttcaaccgaatacctgcttgcacagtcatcgttagactttctggctcgtattccaaaaccttattcattttcaccatatccagtgaaatgccaccttcaacggttaaattgccacccattagaccagtcgaattaccacgcggaacgataggaatatgatgatcgcttgcatatttaacaacgttttcgacttcttcattagtttcaggttgaattaccaagtaaggcattgctctaaccgtcttaaattggtcatgatcccaatgaacagttggcttagtaatgaatcgctctggatctgagataaatttactcaaattatctatatctgttgcagttaattttttaaagtccatctttgacacttctttccaaattgaaacatcctatattaactaatgtatccgcttttgtaagcggtgtcaaaaacaagaactgaagatttttttatctaaaaaagcaaatttccatactacctcactttaaaatgcgatagtatcgactttcatttaaataactattacacaaaatatgaaaataaaaaaactgccttacgacagtttctagttaaataaatccgacatcttagttggaatattattgtttttcacaaaatactttttaaaagtaggtaaatctgcattttcttttttcacatacatatcatgtaaagcccaaaatgcagtgattaacaaattaacgcccaagacaattaacataccgattaaaatatatactaagtaaagcattgatctatcccccgctatatcgtcacttgacccagagtcgcatcttcaatgaagtatctgacgaaagcttgattgaagctcatgccctggccgttgtaaacatgccactcttcgcgtttggcacctacagttctaatgattgaaattactgtgcaaattaccaaatatgcgattagcacgttaaaaattattttcattaccagcatgtctacacttcctctctgtactactcaactaatacactaatatttattagtcaatttgtcaacatcttttagtatttacttttttctccccaggtataaaaagccatagatagctggtccgatcactaccgccccagctatagaaactataatcactgcaataaagcgaggcatagcaaaaaattccgagctaaatttcatacaggcccaggccccaaagaaaaaaatcgcccagccaattaaaattgaaattagcatatttaaacctgaaaatttaggtttagagtttttattgttcatcaagttttctctttcataaaaatattgtgccacaaattgaaggtcaataaacaaaagtgacagattcggtcgttttttagacttatttggtaaaaaataagggagattaagtaaaatatggcgcttaatctcccttttgaatcaataattatttgcccataagacctgaaaaagccattcctaaggcagcaccaccacatgcacctgctttagctgatacgggacgagcataactagtaattgcataatgaaacttcatcacatcatgtgacaatttaccctgccagcttaatggatcaagaccaactcgaattaagttgcagacataattagctgattcaccattttctaactcatgctttgcatcaagtaggatttttctttcttctggcttagtatcttcatttactagtaggtcagtaatattacttaatagccattgttttaaatcatctttattttcttgatacatttttatccctctttttcgactttttcattaatatcaggatgcatccctacaaccattttagaatctttcatgttcttcatcgattcatttattttaataaaaaactctgcaagtagcagagctttttacctcattgcagagttacttatacatatacttagcacatgcttttttagaatccataccattacgaatcttcaaagctaattcaatcgatacatccgcaataattgattgtgggtcaatcacattgtaaggatgatctggtgccttttcctgagctaacgacaattctgtacatcccagcaagattacgttgcagccataatcatcatgcattttttgcaagatctggtggtacaatttaccatcaaccattcccttttctttaatatcggaataaatgagcttattaaccatcggttgaatttccggaccacctaattctgcctcacggtgaaccgcatgaatttcatccacatacaaatgatcatagattgacccttcagtcgcaatcaagccaattttcttttcttgtgggtatttttcaataaattgatgcactgctattctcatcatgtgtaaaaatggaatatcagtcaatgcagccaaatcatcataaaaatagtgagcggtattgcatggcatcacatagaagtctggtcccaatttggcttggcccagaacatcgtcacgtaaatcatagaaaaagtttggtttagtatgatctttaatataagccgttctatcaggaatttgtgcatcattaaccaaaatataatttaaataatcttggtccttagctatttttacacggtgattaattaaacgaacgtagctttctgtggcaatagttcccatgccgccaataatactaaagaagtgtttcactattttcacttactttctaaagtgttcttcttgaccttccaactcattaattacctgctgtgcaaccacaatatcagatggatatggggtatttactccgcgaattttttggaaagcgtcagcccccttaccacagattagcacaacatcatctggcgtagccatggcaatcgcatcatgaatggccttcttacgatctaactcaatagtaacgtcgcacttagagtgatctattcctgaatcaatttcttcggcaatactctttggatcttcaaagcctggatcgtctgtagttaaaaatgctttatctgcgtatgcagtcaaactttcactaaaaccgggacgacgtgacacgcctttatcaccaggagctccaacaacaacaataattttaggatcgttgaattcgttacgcataaatctcattaaagccatcattgaggccttattatgagcgtagtcaactacaaccatgccgtgcttctttgttctctcggtttgcatccggcctggaatagtaacatcgcgaatacccttcgcacattgatcatggttaagtccagccaagcctgctccaataattgcggcagtaccatttgactcgttgaaatcacccagcatctttaaagtataatcaccattaattggtaatttacgtgccttatcactagcacaaactaaattgaaccgagtttctttcatatctaattgttcagaagagaatctgaaatcaattggctgcttcaagtctggattttcaaaattatcgcgggcaaacaaataaatactatcggggttggtagtagttgttgcggcagcgtagacttcatcaaagtgtgcagtttcagcgttgataatacatttacgtgagttaacaagcaattgtaatttgcagtgcaaataatctgcaaaattagggtgttcgttaggaccaatatggtctggactaatattcaggaaaaagcctaaatcataagttaaaccgaagacacgatttttcttatatgcttgactagaaacttccattaccaagtgagtcatgccattatcaacagccgttctcatgtctcggaataagtccaaactctctggtgtggtcaagcttgacttaaagctatcttcaggcttaggaccgaccacatcattaactgaagaaatcagagctgtcttaccaccatttgcttgatcaagcatccctttcaaaaagtatgctgatgtagtctttccctttgtaccagtgaaagctacaacaaacaagtcatcttgtggaaaacggaagaaagcagctgacaaaagagccattgccttagaaacatcgcgcacaattaaagcgtgcattccttttccttctggatatggttgttcagctacataacaaatggccccattgtctttagccattgacaaataagttggtctaaagcctgctcccttgcagaagaacaatgtattagtttgaatatcgcgtgagtcataagacacatagtccattttagtagctactgtatcttgcactgcgcttgacttgagcaagtgatgctcttttaagatcaatatacaggtatttaaggaaatactcattaacttttctcctcgttgtatttaaaacatttcagtcaaaattataacacagctagtgtgttggtgacgctttcttcggatcaagtggcaaacgaataataaaactagtccacttttcgtttgattcacagcgaattgtaccatggtgtaaatcaaccacacctttggtgatagataatcccagaccagttccgcctgtcttagtatttcgcgaagtttctacccggtaaaaacgctcaaagattttatttaatgatttcttcggaattggtgccccattattttcaacgcgcaactctacttcacgtttgttgactaaattggctaccaatttaattttagttgcccctgtaccatacttgaaagcattagaaatcaaattattgtaaacgcggaccagcttttccgcatcagccttaatcgttagattctttggccgcgcttcaatctctatttcaatgccatttttttctgcttctaattcaaagccggccgctacctgctccaacattgaataaatatgcaaatcattcagatttaacttagtattggtcgactttaaagtagtatattcaaacagatcgttagccagtgctttcatttgttctgccttagtataggcaatattgacatactttttctgatcttctggcgaagtcactcctgcttttaacaaaccaagataaccaataattgatgttagcggcgttctgatatcgtgcgaaacattagtgatcaattcatccttagattgctcaattgcccgttcttcattaatcgaatttacagtactatcaaccaacgaattaatcgaatccactactcgttgcaattctggtcgtacccgaaaattaatccgatgatcaaaatgaccattagcaatatagtgaagttccaaaataatgtgacgtagctgcatttggtgatagcgtcgaatcaagcgccagtacaaaacaaccaagtcgcccactcccattaagacgatgaatacgttttgccaggaccagagatgatagccacctgcaaaagtgatcgtcttttttagaaagtagattccgttgaccaggctttcatcctgcaaaatagctaagtgaatcagaatgataattgataaatttaataaaaacagaaggacgaccgttacgaccccttctgcaaacaattcgctcttttcggcgccagttagcttgacgcgttcttttttcatcttatgcctcgaccttgtaacctacgccccaaacagtttggatgacatcctcaccatcagtggctttttgaattttatcacgaaggtgtgacacgtgtaccatgacagttttagctgaaacaattgattcttgttgccaaacacgttcaaagatttcatcagctgaaaaaacacggttagggtgactagcaagtaagtataagataccgaattctaaggcagttaattggatagtcttaccatcaatagtcttaacttcatgtgaatcacggttaattaccaatggtcctacttccaaaatatctggtttttcattcttaacttgcttttgacttcttctcaaaagtgaacgtacacgagccattacttcaagtggattgaatggcttagaaacatagtcatcagcaccagtgattaagccttgaatcttgtccatatcaccggttttagcagaaacaataataattggaatatcggagtcttttctaacttccttaattacatcgattcctgacatatttggcatcatcacatccaaaatcatcaaaacgatatctggcgtagtggtcaatttagtaattgcttccttaccactatatgccgcaacaggttcatatccttcatttttaaggtagatacttaatagttctacgatttctttgtcatcatcaacaactaaaattttcacgaggaatgttcccccttcttgtttattattctctgtttttctatctacagtttagcagatatcatatagaatattttacacattttagaaaaatatactgctttcattatcctttttaaacaaaagctaaaaaaatacacgtttctccatcatgaaaaacgtgtattcattctatttactttaccttatcatcatgcaatttagtttcgacataaacgcagacgataaatagcaaagcaaaacagcagatcttaggtgctgttgcataatcaagcatgctagcaaaaccgaataagataccatctggaacaacccaccaggagccgatcgaagaattaaaggtatcactaactgtcgcaaagaatgcaattaaaatcgttaaaacaagtaaaactgaagttaagatcattcccggccgaccaaaatctttaaaaccatgatcccagtagactatcactccaagcagtaccaataagattgataccagccatagactaccctttttcataataaaggccttctttctgcccttatcctaacacgattaagtagcagctgccttgtttaacgcttattgaatttccttcttgccagtgtagagttcatagtagtaacccttttgcttgattaattcatcatggttaccatgttcaataatatgaccatgatcaagtaccaagattaaatctgagttaacaatcgttgacagacggtgagcaataacaaaactagttctaccagtaagcaagttgtccatcccggcttgaaccattttttcagttcgagtatcaatacttgaggtagcttcatcaagaatcattactggctcatcagcaatcattgcccgcgcaattgacaacagctgtatttgcccttgtgaaaggtcgccgccatcaccatcaatcacagtttcataaccgtgatcaaggtcatggataaattcatctgcgtgtgataacttggctgcttgataaacatcgtcatcactggcatctggattaccaaagcggatattgtccataattgtgccagtaaagagatgggtttcctgtaaaacaattgaaagtgattttctcaaatcatcttttttaatgtttttaattggaataccgtcataagtaatcgttcctgaatcaatatcgtagaaacggttaagcatgttagagatggttgtcttacctgcaccggtttcaccaactaaagctaccttcattcccggtttggcattaatggaaatgtcatgcaagatttgatgatctggtacgtagctaaagttaacatgatcaaaaataatatgaccacgaacttgaaccttcttggttgagccatctttttgtggtacattccagtaccacttactgccgacttcatcgtttttcttagaaagagtaactgtaccttggtcagcttctgacttttgatcttccaagttgaaaattctttctgcaccagctaaagccattacaatagagtttaattgttgcgaaatttgggcaattggcatactgaattgcttagataactgtaagaatgaaccaatggcaccaagtgaaagcggagcccaactattaattgcagcagcaccaccaacaaaggcgatcaaaacgtaaagcaagttacccatgttacccataattgggaataaaattgtagcgtaagtgttagccttacctgaggcttgacgcaactcatcattatatttgtcaaagccttccttagattgtggctcatggctgaagaccttgatgaccttcaaaccattaagcatttcttcattataaccattgatttggcccagcttcttttgttggacttggaagaagtgacttgatctaaccgttaagtagcgcacaattccaaatgataaagcaaaaataatgaaggagaacacagtcaattgccaactaagtgaaaacatagcaactactacaaataataaactcaaagctgagttagtaaattgtggaattgactgtgaaatcatctgcatcaaggtatcaatatcgttagtataacgcgacatgatatcaccaaattcattttggtcaaagtatgaaattggcaagctttccatgtgaacaaacatttcgttacgtacacgatattgcactttttgagctaaaacacccatcagcatgttaaaaaggtaattagacaaaaaaccaatcgcatagatcccaaacattaccgcaattgcagtagctagagggccatagttaggaactttttctttagttaaaggcacaatataattattgatcaaacgttcaatgaataacgagccaataacgttgctggcagctgctagcacaatagtgatcatggaaacgatgagcatccatggacttgtactattaaccagtttcaataggcgcaataagattttggttctgctaccctttgtttgatttttacttttttccattgcttgatccaaattgctcacctactttccttgttcttcctggaatttagcgattgaactataaagttcgttagtcttcatcaattcatcgtgggttccgatagcttgaatttgaccatgatccatgacgataatccgatcagcatccttaattgaaacaattctttgtgaaataatgattttagtagtttctggcatatctttagccaaagacgttctaatttgtcgctcagtactggtatcaacagctgaagtggagtcatctaagatcaagatcttcggattcttaagcaaggctctggcaatagtaattctttgcttttgcccaccagaaacgttgttaccaccttgttccaccattgtgtcataaccatctggcatttcacgaataaagccatcagcatgggcgattttagcagcggcaattacttgttcatcggttgcattttcgttaccccacttgaggttatccttaatcgttcctgtgaacagcacattcttttgtaaaaccatcgcaacgttatcacgcaaggtcttcaagtcatatgacttaacgttgtgtcctgcaacccgaacggcaccagaagtaacatcataaagacgcggaatcattgaaaccaaggttgacttcgatgaacctgtttcaccaataatcccgattgtttcacctggcctaatgtgcaaattgatatcttttaaagcatcagccttgtccgcaggttcgtacttaaagctaacgtgatcaaagataatttcaccattggtcaaacgtttcaatggcttcttaggatcttcaattgttggttcttccgtaatcactgaccactggcacctgagataaccaattgcgtagtaatcatagctaaaatgtttaaactaaacaaaactgagtttgaataagtaaacattgaaattaattgaccagtttgtaaactaccgccaaccacttcttttgcaccgaaccagcagattgacagcgttgaaatattcaaaacagctgcaactactaatgcgttcaaagacataatcttttgtgcagtcgcaaacaacttgtaaataaagcctgatgacttcttgaattctttaatctgcggttgttcttggacataggtcttaacttcacgaataccacgtacgttttcacgcacaacctggttcattcggtcataccctctaaaaatcttaggaaagtatggataagctgttttaataatcaaacccaaagcaattgcaaaaaccggtcctaaaactgcaaagattaatgataaacgcggactaataataattgacataataattaaaacgatgaacatcattggtgctctaacagcaattctgatgatcatttgatatgccatttgcacgttgttaacgtcagtagtcaaacgtgtaactaaactggcacttgaaaagtgatcaatattttcaaaagaatagtcctgcatatggtagaacatgtcttggcgcaagtttgcggcaaaaccagcagctgcatgagctgagacataactcgcactagcgcctaaaattagcgaaataacggttaacactaatagcaatagccccattttactaatataggacatatcccccttcataattccgttatcaatcaaaattccgaccaaatatggaatcagcatttcaatgataacttcaccaataacaaacattggtgagagcaaagacaattttttatattgcctaattgatttgctcaatgttttgatcatagagacccacccttctattcttttattcaatctcgcaaataaaaagataaatggatcatctcccaatgtcattaagttaagacattgacaaattgaatctaatctctgtagaaccgaatcattatgatttggttctttttttgcataaaataaaggcgaaaagaacctaccttttcgccctctgattaaattattaaaccttcaaaattattgccagaaagctggtgttaattatgaaagcccttcacagaaatattttagatcgtcttgatcaaattatcaatgatactggaaagcatattcatgattttatcgatgatcctcatgccttcactaggaagcggtttttagatgcagctacagtcattaaaactactattaatatgcaaggaaaagatttgaccagtgagttgtttagagcttttggccaaaaagctattaaaaataacgataaagtagtcagtacttccgcttatgtccaacgcaaaggtcagctttcacccgcatgttttaagcatattctaactgtatttaatcagaatttatttaatatccagttatttgatcataaatatcgtatatttgccattgatgggtctgattttaatcaaatctggaatcctaaatcagagaatatcgttggaaatctcaatcataaaggaaagccatattgccaaattcatgttaatgcactctatgacctgttaaataatacttatcaagactgcatctttcagcctaagtcaaagatggatgaacgtaaagccgccgttcaaatgcttaaaaagctaaattgcggaccatatatagttactatggatcgaggttataccggctttaacatgattgaaaattgtaatcgcctgcctaactgttattatgtcatacgtactaaaacgggatatggcgcatttaaggaagtagctgagttgcctaatcaagagtgtgataaggatatagcttgctgggtgactacctctaattattattatgaaacccataaggctacagaaaacgttcatttggttaaccatcattaccgtcaatatataaaatatcggtctaaaaataccaaagatggcagctgggactttggagagttatgtacaataaaatttcgtgcctgtaaatttagaattaatgatcctaaatcaggcaaagaagaatgggaagttgttctaactaatctaaatagagccgattatcccttaaaaaggatcaaagagatctaccatttgcgctggggcattgaaacttcattcaaaaagttgaaatatgctttaggtagcgtacagtttcattccaagcaggatagatttattgaaatggagatctatgcccacatgattatgtttaacgcagtcagtcaaattgatgctcaagcatatgtaccacaaaaaaactgcaagtatcaatatgcgatcaatttcaaacagtcatgttttgtcatccaggctatgtatataatttcttcttcaactgaaatctttaaaaagattcttattcaaattagtcattacacaattccgatcagaccaggacgaaaagacaaaagaaatctcaaacccaaatcagctgtatattatttatatcgtgtagcctaatttctaaacaaaatttgggtttatttggcatgaaaaaagatcattcaaatgcgataaatcgcaaatgaatgatcttaaaagtccaagtcgataatttgtcaatgtcttaacttaatgacattggatcatctccatttatcttttttatctatattaagtttaagtatgtgcttatttttacggaaattcaattaacatgcttgcaaaacaggtaaattatttatgttgttgtggccttggtgcaaatgcggaaccaacaatattgtagtgctttctgaataaataacgtacaccataggcagccgccgcgataacgatgtcagctactgctggtaaaactgggttgattacgcgcaatgctgggatttgcaaaatccacatccagacaaacaaaacaactgctatagccaacattcttaagatcagcttaaccaatgaaggacgtttaccttgctgaggcattagccaatcattgtatttaaccatgaagatccccattaaaatacctacactggcaattgtcagaatccccatttgtgaattatacggttggttcttagtttggaataatgcaaggataccacataaaccaacaaaaattgctaaataaagcaatgcgccatcaaccatcaactgccaagttggtgtagccactggctttttcttaggatgaagcatttgttcagccttaattgctggtgaagccaggtaaagcccattggctggttgcccatgacgttgggcaataataatttcactgagcaagccattagtcatcgcaactgcatcagcacgtgacattgaaccttgtttttgcagttctttttctagacgaaaaacatagtcactgttcttgttactcaacttttcacgcaaagcttttggatcttcctgcttaattttttcatcctgagtatcaagctcagcttgcttctttaatttagcttgtttttcagtgttaatttttgtttgatcttgttctctctttgtctcttcagccattcttactcctagacgttaaatctaaattcaataatgtcaccgtcttgaacttcgtaatctttaccttcaagacgcagcttaccagcttctttaaccttttgcatagtttcaagcttgtctaaatcatcaaatgaaacaacttcagctcgaataaaaccacgctcaaagtctgagtgaataacaccagcaacttgtggagctttcatccctttgtggaaagtccaggcacgggtttcaggaccaccggcagtaaagaaagttctaaggcctaagatatgatatgcagcacgaatcaaacgatccaagcctgattcttctacgccttccatctcaaggaattctttcttttcatcatcagccataccagcgatttcttcttcagttgcagcagaaatacctaagcattctgcaccttcgctttcggcatgcttcttaacgatttggtaatacttgtcgctttctggatcagccattgaatcttcagcgatgttagcaacgtagataactggcttggaagttaacaagaacaagcccttaacaatcttttgttcatcttcattaaagtcaattgaacgggcagcattaccttcttcaagtactggctgcaatttattcaaaacagccatttcagccttggcttccttatcgccttgttgagcaaccttctttaccttattgattctgcggttaacagcatcgaggtccgcaatagcaagttccaagttaatagtattaatatcttcttctggatcaaccttaccagtaactgaggtaatattgtcatcatcaaaggcacgaacaacgtgaacgatggcatcagtttgacggatgttttcaaggaacttgttaccaagaccttcaccttttgaagcacccttaaccaatccagcaatatctgtaaattcaaaagttgtgtgcacaatcttcttagcaggaatcaattcttgaattcttgccaaacgcttgtcaggaacttcaaccattccgacatttggttcaatggtggcaaatggatagttagccatttcggcaccagccttagtaatcgcattaaacaaagttgacttaccaacgtttggtaaaccaacaataccagcagttaatgacatttgttgtcctctttttctaaaatcaattttttatttttacttacttgtctattttatccaaaatttggccgagcgatacgatcttttggcacatattgctctttttttgcattaaccggatcattcgccttagttaatagcttttttagcttccggttaaactcgctgcgcggcatcatgactatgtgcccacaacccatacattttaatttgatatcagcacccatgcgcaggatttcccaatcattagtctgacaagcatgaggctttttcatttgaactgtatcagccaaattataaacaatttctttagccatctaaatcaacacctaacaaatcaagaatgcggttcaattcttcagtcgaagcaaaatcaatcgataaatgacccttacctttttgtgtttccgaaatattaacactagagccaaacttgttagctaattggctttcactagcgcggataaaagcagactttttagcagttttcttgctgcgtggcttcttagcattcagttcattgacaaccgcttcaactttacgaaccggcatcccttccttgactactcgcttagccagcgcatcaatcttttccttatctttcaaacttaaaagcgttctagcttgtcccatcgacagttcaccatgttggagtaaacgcttagtcttgctaggtaaagtgagcaaacgcaaataattagcaatatatggtcgcgacttgcccatccgcttcgaaacttcttcttgcgttaagccaagattcttctgcagcatttcataagcttgcgcctcttcaagtggagttaaatcttcacgctgcaagttttctagaactgccacttccatcatttggctttcgttaaacttgcgaataattgctggaatagtcttcttcttagccaatttagaagcacggaaacgacgctcaccagcaatgatctcatatccattaactgattcgcgcacgataattggctggaaaacaccattttccttaatagaatccgacagttcttttaagctcttatcatcaaatctttttctaggctgataaggattcggccgaatatcgcccaaatcgagttcttggacttcttctgcctcttgaacttgaggctcatcctcaaataaggcttcaagaccacgacctaggccgcccttttttcttggctctttacttcttgagtctcttgtcatgagcttttaacacctcttttgctaaatcatcatataccttggcaccacgagattttggtgcatattctgtaattggctgaccataacttggggcctcagctaatttagtaattcgaggaatgatggtcttataaactttcttgctaaagtaggactgcacttctttaaccacttcagcacccaagttagttctggcatcaagcattgttaacaaaacgccttctacgccaagatctttattaaaatgcttttggactaaacgaattgtgttcaaaagttggctaagtccttccatagcataatattcactctgaactggaatcaaaattgaatcagatgcagtaaaagcattaattgaaagttgccctaatgatggcggacagtcaataaaaacaaaatcgtattgatcgctaattgcatctaaagctgactttaagcgtgtctcccgagccatcattgaaattaattccgtttcagcaccggacaagttgattgtggctggaaccatatctagctttggcgttgaagtatggtgaatagtatcttgaataggaatttcgtcaatcaaaacattgtaaatgtcctggtcaatctctgatttttcaattcctaaaccagaggtagcgttaccttgtggatcaatatccacaattaaaacgcgataaccacggtcggcaattgaggctgctaaattaatggtcgtagtggttttacctacgccacctttttggtttgcaaccgaaattacatttaccatattgttcatccttccctattacttccttttcaattcaattgtgatcttataatcatccggatctttattttctgttactttgactttaattcctgagtcttcggctaacttaaccgccttcttaatggtgttaatttgtacctttaagtctttaggaactcggctaacgacccgcttagcttcttttttagccttaggcttagggttaaagtaaacatccacatcttgcacaatctcttcagtttgtttaacgtttaagccttttgcttcaatttctgtcaaaacgcgatcttgatctgcattacttaagccgatcattgcacgaccatgacgagcggtaattttgccagcaatcaaagcttgctgcacattatcatccagcttcaataagcgcaatttgttagccacataagattgagacttacccatatttttagccaaagcagtttgagtcaaatcatttaattccattaaattagtataagcttttgcctcatcaattggatttaagtcttcacgctgtaagttctcaatcaaggctaatgaagcagcttgatcatcactcatatttttgacgatcgcaggaatagtctgccagcccaagcttttagctgcacgataacgtctttcacctgcaataatctcatattgctcgtcatcgccatcttcacgaactacgataggttggagcaagccatccttatcaagtgtttcagctaattctttaattgaatcatcagaaaattcacgccgtggttgatagcggttaggaaaaatcttgctcaattcaagatcttgaacctgtttattcttaggaatttcatcatcatgatgcataaaagaaaataatgacataatatacccctttctgtttaatgaatcggtttgcgccgcggggtgcctgcttgacgtggatactttttaggtgttgctttgactttttgaactaagattagagttcgttcttcttcgctctcaggtagagtcaattcttcttccttaatcagcttaccgcccagcaattcaagagctttttgaccatcatccaattcatcttcggcttttggtcccttgagggcaataaagtaaccatcttttttcaccaaaggcaagcaatattcactcaaaacactcatccgcgcaaccgcacgagcagtaacgagatcgaacttttctcgataaagcttattttgaccaacgtcttcagcgcggccatgaactaattcgacgtctttcaagtctaacttagtaattaagttctttaaaaaagtcaatcgttttgccaaagaatcaacaatggtaatcttcaattctggctgcaaaatcttgagcggaattgatggaaaaccagcaccagcaccaacatcacaaagagtggcaccatctttaaaaacatcgccaaaagtaaacagcggcgtaatactgtcataaaagtgcttaaggtaaacctcatcttcttcggtaattcgtgtcaaattgacatgctcattaacttcgatcaaataattaaaatatattttaaattgttcaatttgttggtcagttaatttaaaattgtgttttgatagttctaaaataaatttttcaggattcatttttcacccgtgaaaccgtgtttcacacctctaaatttaacgcaaaatgcattgattagtaaagatatttcatcttatcaattatgaagtatttttactcaatcgtcaaagttttgcctcccgcaaaatagggtataataaggcgcaaaggagttaaaaatatgattgttactttaattgttttagcttacttagcatataaaacatatttaggctataaaacaggctttacacgctatatcatcggtttaatctgttccgccattgtctttatggttgccattttcatgcaaaatccatttggtaattggctatacacacaatacactggagaaatgattaagactaactccactaacaacgtggaattaatgattgcacgctttgtcgctttctttattgttttcttcgtgggcaaaatgatcatgaagattgtcaaaagctggattcctaacaaaaatccacatgcgactaacttaggcagtattctcgacaatgtcttgggtgctctagcctccctaattgctagttattttgttgtttatgtagttttgtccatgttcaatgcactacaaaatccatggtttatgcagcaaacaattgattctagctttttgaggtttatcatttacaacacaccggggctttcaaacggtgtcttcaataatatctttaatattggcaaaactgtgggataaaatatatcaaaaaagatctgcttgtatcatactgagcagatctttattgatatgttttaactaaattaatactacatttatgaaccaacattcgatatacttattagcgcaggaagttttatgagcggcggctggttctccccccggaggtgaggcctatgggctacattgatgaaagggttccagccatgtcggtttacgagagtatctccttgatgcttttgttcggtacatttttgttggctttgctgacatatattgaccaccaccaaaaataaaaaacgccgctcaaacatactttggccagttattgagtagcgtttaacgtaaaatttaacatttgaagccgccgctcttaaagcgggctgcttggagtccctaggactcctttttctttagtcattatagcatatttcactaatcaccgaaattatcatattcaatatgttcatcattataaacaaagattgcaccaattcgatcagggttatcatgccaaccctttagtggcttgccagcaaagaataatcgtttgcattcaatttctgcttcaaccgatgttttggtaaaagtagtcacaccagctaaatcagtctttacaggatacccggttctaggatcaatcaaatgatgatactttttaccgttaactactaagtagcgctcatatgtcccactagtaacggctgagcattcaggcaccataactgacgtaatattgtcgcctcgcggctgtttaggatcttgcacaccaattgaccactggccactaattcttttaggcgaatcaccaactaacaagatattaccgcccagattaataattcctgcttcaacgccatatgcacgccacaagtcacgaattcggtcggcaatccaacccttagcaattccacctaggtccagctccatgcccttcattttaagaaaaacagattggtcactgtcatttaaaaccaccttaaatgggtcagttaacagcattctatctttaatttcttcatctttaggaacatgtgcgcctttaaaaccgatatgccaaagcttaacaactggtccaatcagagcattaaagccaaaattctcacggctcttttctactgccaatttaaccaaaccatacacagcactagagacctgtaccggatgttctccagcagcatgattgatatccattacttcagattcatctcgattaacggtaaaaatatcttcgtaatgatcaattaaatcaaatgatttttgcaatagatcacgattttgagtaccaaaaatctgcaatgtaattgaagttcctaaagcatgatgatcaccaaccacctgctctaatgctaaatctttaatcataattatttctcttccaaatataaatcacgcaacgcctcacgtagttctgtcgttacgccaattttttcttgtaaaaagttatcgaaactaccaaaattctgctcaatagcgattaatgaagtatccaaaaaagcatcagaaactgaacctaaaattcgcatattagcgcgaaaacaaagattctcgccctcttcttgcatttttttatctcttttggcccgatagttattaagcatataatttgagtacaaatagtcctgtctaattgtttccatatctacgccaagcagatataacaagactacagttaccaatccagttctgtcttttccttctgaacaatgataaagtacagcacctttttcagtattggccaacagctctaaaattttatgcaagctatgttgagcgtgttctttcaatacatgtgacttgtaacgctcacacatcattctaaagccagcatactgatcttgacgataagttgcgaatacttgggttaagtctttcttaccgcctttggtgttgtcatcaacagaaattggaatacagaaatgctctacgccagggattttgctgtctggacaatggtcacattcagttggtgaacgcaaatcaataatcttagtcaagccataattgagcaaaaactcttgatcatgtctcgttatgttgctaatcttgcccgttcttaataaccgatgcatcttgaccttacgtccctgatagccaacatatccgcctaaatcacgcggattacaaactttttctaatggcaaaatatttggtttcattaatttcatctctttattaagtattttgataaaaaagccggatagtgtccctatccggtaattttactatcacgtggtaagtcacgcaaaattatttgttagcttgttcaacaaatttaataaagttagccatcatagcatctagttgcttaatataatcttcattggtcaaatcgccagtttctttatcaaaattgcttgcagcaccgccaattaagatttcattgcctggcaaaacattggcactcatgtctggtgaaagcaagatttcacgagcatcttcttgcgcacgactagatccttgaataccgtatgaagtaccaacaactgcagccggcttcatcttcatcacattaggaccagcatgtgaacctaaccattcaagcgcactctttaaggcagctggaattgagtgatcatattctggtgtagccaaaattacaccatccgcattcttaacatcctcgatccacttcttagtaacatcatctggctcatcagttctacagaaaggcttaagttgatcgatttctttaacttcaatatcagcttgctcaccataacgcttagcaataaattttgctaaaaaacgattgaaagaaaatggagcgtttgtaccaacaattgctaaaattttcatttaaataagccccctacttagtaagttgtgcataccaatcatcaacttcatcaaagaagtgattcaaaaacttaagtgtacctgcatcggtcaagtcgcctttatcatcaaattgttttggtgccaaacccatcataaattcgtcaccagcaaagacatgagcactaaaaccaggtgcgcccaaaatgctcttcaagcgagtttgcgaacgagacgcaccttgaggcattggtgaagttgacacaataactactggcttatcatggaatgggtgaacagaactagaaagccattcaagtgcactctttaaggcacttgaaaccgagtgttgctgttctggtgaagcgatcaaaaccatatctgcatcagcaatttttttacctaaagctaatacgctagcaggagcatcaacgccttctttatacataggcaagcccttaacagtcgcaaagtcaaaatcatacttatcgcctaagtccttaataatgactttaagtaatttttcgttaaatgagttatcggcattggagcccgataaagctaataccttcataaaaaccacctttcaaaaatcctcttaattatcattatagactaatgtagtttaatttatgtcattttaattttaataacaacaagaaaaaacgccttcgataatgaaggcgccctctactgaatgaaaagcacaaatgattggtgaaatttctatgccaagttatccttaagcgaagcttcttcgtcggcagcaaacattgggttttcttgagtttcgctgagacgattgttaagcatagcatcgtggatttgagcattcaacacattgacgatttgagtttggctgaagcttgcaatctcattaacaatcaatgcagccatacctgtagtagaaatccagttagcaattacgatgtcatgaatcttttgatcatcataatcaacatcaggatattgttccttgaacttttcagttccaagttccatcaaagtgtcagcaatgatcttgctaccaaacttgccatcaacgaacattgctctaaacaagttaacatgagcttgagcaaaatcaatgtatgacaaatccaagtcaattaaaggttcaccaacgtacttttgttgtaaagtatgagttctcaagtcattagagattcttctcaaaacttgattgcgaagatcatccatgttgttaaattctagatacaaaggttgggttgagaagtgtcctgctttagcaatgctacgagcagtcaaaccttcaataccatccttgattgccatcttgtaggctgtatctaaaattttgtctttactaatttctttttttcttgccattttaatgcacctcaatcattgtataaaacatgtgcttttcaatacacttgttttcttttcttcatcactataatatatccaaaaaaataacaattgcaagtcttatacactaacttattaaaaaatattatcatcgcttaaatagcgatgagccgttgtctcctgtaaattgatcataatgtgaagaagccatttcaataactgcttgcttgtccaatccttgtgcagcacaaaacgaaaagaatgcagcagataaaatatagccgcgttcacgatcatctgtcaggttatctgagaacttcatattaatcgaatgatttgcataatccgttgtcaattcaatcgatttattttctggtttactactcattctattgcaacctcttttttgttctaaaacaaataaaattaaaaattcccggatttaaaattgaagtgcaacactaagtgttaaacaaaaaggccatgaagacctaaacttgaagtgacgaaaaatcaagaaaggaagatcttcatgaccaattcaaattctagcatttctaagcactatcatcaattaaccagcgtacaacgtggacaaattcaagcaatgctggattccggcataacttcccgtactgttatcgctcaagaagttggctgccataagtcgacaatcagtcgcgaaatcaaatgcggaagcgtcctgcaaagagacagcagctatttattgtatgagcactattacgctgatactgcacagatttattatgagaagcgtcgcaaaaactgctatcagcgcaatccattgaagcattatgctgtctttttgagaatgctctccagacgctttaaagctaaatttgatgccaccagcatcgatgagttcgttggtgaattcaaaaggactatgccaggctacccttgtcccagcacaccaaccgtctatcgctatattgatcagggcttgctggacataagcaatattgatctgcctatgaagctcaaaagacgcaggaacaagcgtcatcacagccatggcggtcacgctttgcacaagaagcatcttggcaattccattgaacagcgtcctaaggaggttgaagacagaaaagctccgctgcactgggaaggagatctggttaaaggcgtcagacgcaagaatcagcctgctttaatgactttgactgaaagaaccacacgctttgaagtagttatcaagattcctgactatcgggcaagcacatgccaaaggctgcttcaaaaggagattgacagacatcctgcctggtttaaatcaatcacgtttgacaatggctctgagtttgcggatatgaccaagatcaagggctgccagatttactttgctcacccatattctccatgggaaaggggcaccaatgagaactgcaatggtcttttgcgtcaattcttccctaagggcaagagcatgaaagacaagtcaaaagcttatgttcaacaggcaactgatgccattaaccacaaatatcgccgaatcctccaatatcacacagcagaggaactcttcaagcaatatatctcttcataacctaactgttgcacttaatttgacaattcaggaaaattaaaaatttaaaaatttctattataattatattacaaaatcaaaagaattagaaagcgtgtttttatcaatgaaagtttcaacttggcgctcatcatgcacctcaattttaatcgggaaaaaggcctctctttctggcagtatcatcatcggtcgtaatgaagatgctaagactgcttggcctaagcatttagcctttaatccacatcgagataatgtacagaaaaaccattttaaatccaaagacaataagtttgaaatggatttaccaacagctagctactcttattcttcaaccccagaatggacagataagtacggagtgttcgaagaagacggaattaatgaatatcatgtagcaatgagcgccaccgaaagtgcctacgcaaatgaccgagttttagctgttgacccctttgatactgacaaaggaatcttagaagaagcaatggtcaccgtagttttaccttatgttaaatccgcacgtgaaggcgttcagcgcttaggagaaattgtagaaaaatatggtgcagcagaagctgacggaattctctttggcgatcgtgatgaagcctggtacatggaaatcggttctggccatcattgggttgcacaacgaatcccagatgattcctacgctattgtcgccaatcaactagctattcaagaaattgattttgccagtgacgacttcatgtattctcaagacctgcaaaaatttgtctacgacaataaactctggcctaaaaatcagccattcatttggcgtgatatttttggcactcatgacgatagtgacttacactacaacacaccacgagtatggagcggtcaacgtctgcttactccatctgtagcacaagaacccgaaagctttaacctgccatttattcgcaagcctgatgcaccaatttctgcgcaagacgctcaacgcgttttaagcgatcactacaacaacaccgcctatgatttaaccaatcagaaaaacagaaataatgccactttcagacctatctctgtggctactactcaggaatcacacttgcttgagttaaacggtgaaaacatgattcactggctagctatgggtgtggctgcgcaaagtgtttatgtgccattctatcctcaaggcactaaggtaccaaatacctggaaaaatggaaaagaaacctactcaccaaattcagcttactgggtctttaaactggctagcgtcctggttgatcgtaattggggtaagtacggcaccgctttaagcaatacgcaaagtactactaacgaaaaattgcttcaaattagacagcaatatgatcaaaaattagcacaagaaaaggatcaagaacaacaaattaaattagtggatgaagccaatgccaaattagctaaaactgctactgatgcttataaagaattgatcgctaaactaatcaccgaacaaactggtgactcaccgttgcgtttccaaatggatcctaacttataaacaaaaatgcctcaatgaggcattttttcttactattttttcttagtcattaagccgtccatcatttcataaatatggtcggcgtatttttctagccgcggatcatgcgttactagaataacggccttgtcacgctttttcgctaaatctttaaacaattgtcctacttcttccacattttgcgtatctagcgaagcagtcggctcatcggctaacaaaatatctgggttagcatataaggccgtcgcgattgctactcgctgctgttgcccaccagataattcatttggatacttattaaccagcttttcaatccctagctgcttgagtaagccttgcaatttatcttgcgacaaattattttgcttttttactttatcaatcaaagtaaattgctctttaactgtcaaaaatggaactaaattataagcttgtaaaacaaagccaattttattcaagcgtagttctccactttgcttagcagaaaaattactaatgtctcgaccattaatcaaaatttcacctgaagttggtttttgcaaggacccggcgatcgtcaaaaatgtacttttaccggcgcctgaaggccccataattaaaaccacttcacccttattagcctgaaaattgatatctttcaaagctgcaactttagcttcgcctttaccataaactttattaacatcttttaattcaattactgccattttactcaccaattgcctttgctggatcaaccttcaaaattgatctaatcggaatcaaactaccaataatacccatgactagcatccctaacgtaccactaatcataattgctggcgtaaaagtcattggcacagctgctggtaaagttaaatcagttaaccacatcaagataatcgcaattacaacaccaatagctactaaaattatggattgactgatcgttgcaccaactaaagttttacttggaattccttgagcccgcataacggcaaaattatgcattttttgcatagttaaaatatataggaaaacagcaatcacgatcaaagaaataacaaataagaatccaatcatcaattcaaaagttaagttttgagccgtatatcctggaagcttattaataaaggcttgaattgggtatgtcttggcatccttataattgaatttataattgctattctttgaaacaactgcagaagcggctacattaggagcgaccatccgcagttttttccaagttttcattgagccataaacaattggcgcaatattaatcttggcgttatttacaaaaccaacaattttatattttttcttagagccattcagagaaatttgatctccaagcttgtagcctttgtctttgaaactactgtctactgtaatctgattaccattctttgcttttttcccagcaattatatcttgatcttgataaataaactggtcttttttgatgcctaagaattgagctgaaattgagttttttccctttttcttaactacaattcctaattgaccaataattgcttcattcttgccaatttttgcgttttttaaatcgtcttttgtcagaattgactgactcatgctgatattggcatttttatttaaaacaatcttttgcgcattccaattttcaattgcttgtgtattctgacttgctaacccaacagccaaagatgacaacataaaaattaagtagctgatcaaaaagatcatcaaaataatcaagccatagcgcaatttttcatgcttaatttctttcagtgctagaaacataactacatcccctttgctagtatgtccaggctcttcttatagcgcgccaagttcttttcctgattttcgggatctgataagcataagttgataacttcatgactaagtaccatggcactccacaattgtggccccatattcaacaattgtcttgaataaattttgaaattatgtggtatcaagtactcattttgcgacatatgcaatttcatcattggttcatatttactgtattgaactttatcaataaacttaactactcttgcataaaaatgattaggatcaaatttttcattaggactcatcccagcatgaatgtcttcaatagcgatgtgatacatataaacatatgcatcaattaaatcatcaaaatatttataaaatgctcctcgagcaatgttggcattcttaacaatatgtgacaccttagcatctgctaacggataagtgctgaattcttctaacaacaccgcttcaatacgtctacgtttagcagacggtaaatttttaaaagtttgcttaaccattttgttttccccttttccaacacaaatgacgacttgtcatcaattacttatatcatagctgattttgacgagttgtcaatacatatacacaaaaaaagaaggcctctgccttccttctctaaactaaaactcgattatagtagtacaacctagcaacaccatcacggacgctaaatttgcttaatgcacaattatttggcgtatctatcttgtccatgtcgccattactcaaataatgagctgccatcattcgaatcaaacgaccatgtgccactactaataccttaccttctggatatttttgatatatttcgtctaaaaagttagcgcaacgtgcttcaaactctccgtagccctcaccatttttggcatatttaacatagtcgcgagtaacttttccccatggatcaacgacatccggatattccttagcaatatcatccatcttcttgccgtcccaatcaccaaaatcaaattccagcaaacgtttgtctaaatttaatttctttttacctttagtaaaaattttcgcagtctctactgctctcttcattggactggaataaacaacatcaaatttattttcatcaaacttagcggcggattttttagcatattcacgaccaaattcattcaagtctgcgtcaacttgtgcgccctgaattcgattatctttattcacgtctgtttgtccatgacgaataaaaactatttccattttttacatcaccttttcttaaaatcatacccttatttaactaatctttccatttctttactgtttttttagcgttttgaaatttaaaaagcttaaaatataaatagataattagaaaggggaaacattatgtcccgcgttacaattgaaagagatggtctcaccttagtaggagaccgcgaagaaccattcggcgaaatctatgacatggctatcctcatgcatggttttaccgctaaccgcaacactgaattattaagacaaattgccgatgatctacgcgacgaaaatgtcgctagcgtccgttttgactttaatggtcatggcgaaagtgacggcaagtttgaagatatgactgtgccaaacgaaatcgctgacggcaaggcaatcttagaatacgttcgcaccgatccacatgtacgtaatattttcttagttggtcattcccaaggcggtgtaattgcatcaatgcttgccggtctttatcctgatgtgattaaaaaagttgtccttttagcaccagctgctcaattaaaagacgatgcacttaaaggtaacacacaaggcgcagtctatgatcctaaccatattcctgatactgttccactagtcggcaataaattaggaatgaaactaggcggattttatctccgaaccgctcaagttttaccgatttacgaggtctctgcccgctttagtggcccagtatcagtcatttatggtactaatgaccaagtagttaaccctaaatatgctaaaaaataccatgatatttatgaaaatagcgaacttcatgccattacggatgtagatcacagattcactggtcaatacaaaaagtcagcatcagatttaactgctcaatttttaaaaccattattttagcgccgagtaaagtcgaactcagtacgaaagacgtaatgatccttagtacttacgtcaggttcaaattgaaattcaaaatcattaaagtcctgcaaatctgtgggattttttatttgcttctcggcaatgtagcgcaccatttcaccacgagccatcttagcgtgaaccccaacggtcttccacttaccattttttagttcctgaaagtcaaccgtaattaattgtcgtccttgactcaaataaggtttaaccaaacgtgtatattgcttggaagccaaatcgataactatattatcttcttgaaataaattttcagcgatatcactgccccagaaataatacaagctataatcacgaaaaccaaccattttagtatttaattctaggcgatatgggcaaacaccatcaaaaggccggagcataccataaaatcctgatagaatccgcaaattcttttgaatatagtcaagtgcaggttgtgtaaataaatccggagccatatattggtattgaattcctgaaaaagccaaaattgcaggggttaatcgttcatccaaattcatattttctagttgcaatatgctttgcttagtcacattttcactagcatgccaaaggtcttttaactgttcatttgaccttgacttaagaaatctttctagaattcgtgtcttatccaagaactgcggttttgactgaattggaaatgaatcacgatcaattttcataatttttgcaggtgcaataataattttcatttttagattttgttcctttacggtaaacttaaattgtgattaataagtcatgtggtaataagtcaaatgaaaggcgatgatatttgttctttttgatcataaatttgagtatatgaaactaagccttggtaaaggttgattttttaaatgttaaacttttgtttacttttaaatttagaccaatttttgaaattaagacctcggtgtcctgtacagtttgtcatctttgagcaatttaaagataactcgtactaattttcttgcagttaatgtgcaagcacgtttatgcggcgagtagacagcttcatcatacttcttttggtaatattttttgaaaacaggatcatgtaatcttgctagattggcagcttcaatcaagtaatatcttagatatctgtttccagtcctggccattggagtatgttcgttgctgtgatctcccgattgatattgattccaggttaggccggcatacttagccagctgttcttctttatcaaagcgatcgatacttccgatctcagcgataataccagctgtataggttttgccaataccgggaattgattccagaattttgctttctggtaatgcatcaacgatacgatcaattgctttttctagatctttaatagattcattaaagctttggatcatgttgtaatgaacagaaagcactgcatcaattgaatcagtcattactttgcctaagcgatatgaacctctaacagctttcttaattgctttagccaaggtatctggatcggaaaagcgtcctctgcctttaacctgtaagtaagaaattaagtcttcggtaggcatatccgcgatctcatccagagttttactatcggttacaatagacatcattgtagcaccgaaaagaggagtattaatcttatctttatcgacagtgattagtttattaacccgataatataaagcttcaatgaagtgctgtttggtacgagtcagttcttgaactaattcatatctggtacgcgttaaacgctctaaagcaagatagttgtcttgtctggcaatgcttactcgataatgtccaaagcttagatacaaagcaatgtaataagcatcgagaggatcagttttactttcttcaaagactttatgaaacctgctggtttctttggggttaattacatcagtctctacattgagcttttgtaaatcttcgtcattttggaaaaagtaagcaggatgaaaactgtaaatagatgtagcttccatgccaataatgatttgatcatagtgtttattttgagctagatctaaaatttgttttttcagttcactagcaccataaagatcattgacaaagctatcgttaattaagcgtttgttttgatcttctgaatcaagtgcaacgacctgtaaatctttagaactaacatcaataccgacaaataatttcattggaaatggcctcctttctttcaaatttctgatcatagattttgatcttcacatgttaacccctaattacagttcttaagttcaatctcgccagtataagtattcactggttgcttctttgaaagctgcacctaatcccaattgctcaaggactagcaaaaagaagcaatcaatacagcatgtgagttagagcataaaggaactgcctgggtggcagacttataaagcagacaaaactgcaggaggtgataacctagaccagttgaccaaagccaatgacaattagaggctaacatgtgaagatcaaaaagcaaatactaatttgattaattatcacaatatgactaattacaatttatataatacgaggaggaaaaataatgaatcctgattttgcaattgtcttaaattatcaacttaatgataaggctgatgccgactttttagtaaaaacagcccgtaatatcggtgctcgtgcagtgatgactgacaggcaaactgaagatttcaaaacagcttgcgctaagtatactatttttttagctaatccagaaaatagtactgacttaactaaggataacgtcattgataccatggtcaataaccgtaaagctggtaagactacaattattaatgtgcccgttgaagcaggcaagttttctgccgcaactcaagcaatgctggatacgatcaatgattggatgcaccaattcggtcacgccttcaacgaaggaaaaactagtgctttaaccagtagcgatggctttattttagaaaatcgccacgcaaattaccaaaaatatgtcttcttacctagtcctcttcctgacaaaatcgtggtagaaggcctagtcgaagaacctaaccgggtagaatggattgaacatcgaactgatcttgattttaactataaggatcaaaaattaactattaacttagtcaaaccagatgatgagtttgcttggcaagtgttgcgaattcaagcccaccgacctgaagatgacattttagaaacgaaattttagtaaaaaggcgttctttgtagcagaacgcctttttacaaccttatgtaattgctatttctattttcaaaaaaatttattcttgcttaagctttaactactgaaccattatcaaaaaattctctaaaacgacgtgcttctttatccagagtaatttcatcattaacttgcgataacttatagccaacaaaataaggtggcgcttcaaaacgtgtaatatatttagcacaaataccgtcatcattacgcggataaaagaatagattataagaatcgcagcggccattatacatgatatttaacaaatacttggcaccactttgaatccagtcagcccacaagtcaatgctatttttatctaacaagttaatattgagctcagtgtagccttgaacggggtgttcagcaatgttaacttctaccccacttttttcaaaaagggtctcaccttcaaaattattcgggtgaatatatttatagccatcttcatgttcaaagccaactatctgcatatgcgggtgaatcaaggaaccacctgaatgtggaccatagttcttgtaccaaacaattgactcatattggtcactagcctgcactttttcaaaacaagctagcgcaaaatgcatcaacttgcgattatgttcctgcgtataagtactaatatcgccgttatgatcactagattcaattagtacagtctgccaggtatcgcgcaaggtcgggaacttattcttaagccaaatcatgtcatcttccttggcgtaaatatcagttaaattttcaacatcacaaaatgggcaaacgtttttcttcttatccttacgataagattgcggtttgcctttagcaatgctcatttgaaaaacaagtggatcattagtcatatttattcctttttttatttaaaatagtttaaaatctaatgggtaaagttttactataatgtaaaatattttgtagctttactagcataaaaatacttgttatactttgttaaagcaaacgtttattcgaaatttatcaagagacgggttttaataatgcaatctagaacagaaatgagaaagcgaaacaatcgcaacaatctctatcttattattattggcataattgtcgtaattgcaattatttgtggctttgtcattcataatcaaagggtagctgctgaacgtagccagcgtgaatatgcttctacccacttcaaccctaatgtaacaatttatggtgtgcaagtaggcaagcttactgttaacaaggcgactgctaagatcaataaacaagctgataatgtcgtctttttaagaaataaaaagattattgctgaaaaagacgacaaggttcaaactatcagccaagctgaagttaaaaatattttcactaagcagcatactgatttgccaagcaaacaaaaatacgttttcaaatccgccaaaatagatgaagcaaaaaagagtttgcaaaaaatacaaaatgctgtagtcacctataagatcaatggccaggaattcaagctaaaagctgatgacctaattcacgaagttacttacaaaggtggtaaatataaattcaccgatgtaaaaaaactgcatgctaaaatggaagcgatcgatcaagaagtcaaaactctaaagaagagttataaatttactgttcctactggtaacaaagtcaatggcaaaacgattacggtaaaaaacgaaagctatggttggggaatttatgtcaagaaggctgtggctgcagtagaaaatgcttttattaatggtcaagatgttgttggtggtagtaagtatatttatggcgagggttatagtacctatgctcatggttatggcaagagcaatcatggtattggtaaaaactacgtcgttgtctccatcaaaaatcaggaactatgggttgtccgtaaagggaaagttgccgttcacttaactgacgttgtcacaggtactgaaaataagagtaacgctactcctaaaggtgtttggtatatcatgtacaaagaatcacctagcgtattgcgtggttataacgacgatggctctaagtatgcctccaaagtacaatattggatgccatttactttgagcggctgtggcttacatgacgctagctggcgtagcgattggagtaagtcagcctatcttactggtggctcacatggctgtgttaacattcgtccagctgaaattagaagtgtttggaacaacgttttaactaacgatgctgttatcgtatattaaaaaataaagattaatcgcctacttcaattgaagcgggcgatttttttgcgtaaaattaacagaaaagatatagatttttgaaaggatcaaatatgttagtcatcggtattatttgcttggtggttgctgccatttcttactttaaataccttagtgaaaagaacggacaagctaaccaaaaacaagctgaaaacaaaaatgaggcaaaatggcagcgcactttagcaatcattttcctcgttttcggaattttattaatcggttattggattgcattacgctaaaaaagacgtgaattttcacgccttttttaaatataattgattaccacattacccatattagctcttccctttaaaactaaggtaggaccgccgccattgctttttcctttaactattacattaccaaggctaatgcttaattgattatcaatctgccatgataagggaacgtagagatttacatttcccattgaagcagttagattaagcacgactgtatcacctgctgctttagcatcatcaagatagatattggcattaccgaatgaagcttcaagattaattgactgtaaattttgtgaatgaatataacgtgaagaatcgccagccatcttttgattaattacgatattgtcaccatcttcaatcacatcttgaacatgatgatgtgttacttttgtctctgtatcagcatcgtcactatcatcgtcatcattccaatgaaaactcttcttgataacaatttccggatcttttttaaaaagcaagctcaatcccattgaaacaagcaaagcaataaacaaaatcatccaagaggataagaactttttaatgcccaggggacctgcataagtaattactaaaaaagcaattgagaaaacggacaccacaatgctcttatcaagcaagcccttaattaagcaagccacaaaaatgactgtcaaaataattgtccaaacgctaattttgaagcttaataagcctaattgactgatcaccaaaagcgcagctgcagcgattagtcctactccccacaaaattcttgcaaaactgtttttcattataaagaccttctttcatctaagcatgtgcgtaattctttgtagtatcgacgggatgcatatacagttttataagtatcatgaaactgtatcttgcaatctgaaatcgaccgagttaaaccataaatttgatctaaattaataattgtcgatttggaaatccgcatgaaacctgcgcccaaaatattttctaactcatacaatttatgtttaaccaagtatgccttatcttgtgtatgcaaaattacctgcttggcatctgtttcaaaaaacaaaatctcgttcagtggtaagtagtaagaaacattgtttctaaaacattcaatctgatcattgtgttcaataccttgtaatttcttataaagctgctctatttccggagaaatatttttagctttaataatcagttcatcttctacggcatctggatcaatctcaagttttactttcatgtttctcactcccttctgaatctgatatttatattaaaaaatatttcagatagcttttccatagttttgaactaagtggtaaattttggcttctaagtggcaaaaaaaataagacgacctctgtcgtcttattgcttattatcaatgtaaactagtaaaaaatgttatcagtccaaaaataattcctggaaaattagccgtgaatagcggccaatctttcttttcaccaagaattgcataaagtacccagatcgtgcaattaattgcagcaaccaacggctgaaccggattaccataatttccgttcaaattattaataatttgcggaatatatgaaacatacatcagtacagataataccgacccaatacgtccaatagttaaaacagtttttcggtctaatcctttgaattttttcaacaaatcgctcctttgtgcttcattataagaaaagctagagtcgattgcaaaaatcatactttagtggacaccttccattagcacattaattctcttaactaaaaagaacattattaccgcaaaggctacactgaccaaaccaacagccatgaaatattgtacttcagtgccagttgaatagaacttaacaatttgtgcattcactgcttgtccagttgcatcagccatgaaccacatactcatcatttgcgaacgatatgcattaggggccagcttggtcgtaattgataaaccaattggtgaaatcaacatttcagcaatttcaactaagaaccatgaaccaactagccaaaatggactaaccttgcctgctgtaccataaagcatccctggcaaagccatccacatataagatagaccagcaaaaactagccctgctgcaaacttgcctggagctgttggctgctttttccaatgttcccaaagccaaacgaagattggcgttaaaatcataatgaataatgggttaagagactgaaagttggctgctgtaaagtgccaattaccaatatgaagcacggttctttgagcggcaaacagagctaaaactactgagcctgattcttcaatgccccagaagatagctgcagcaaagaacaatggaatgtaagccttaactcgtgaacgctcaaccttagttacttttgaactacgtagcatcatcacaaagtaataaattggcagtgcaattgctaaaatagtcaataaagtaatgacattgtcaacgttcaattgaccaaagccggccattgcagctaatacaagggcaatcaccacgaacccaataactacccacttaataatattaagcaagtcacccttatcaataggatcattaggcgtcaaactttcaggagaaaggtattttttaccgccccaaacatattgcactaagccaaagaacatcccgattgcagctaaagaaaagccggcatggaagttcatttcattaccaaaaatatgaaagccaaaaccttgtgctgcccatggaactaaccaaggtgcaagaaatgatcctaagttaatcccaaagacaaagatgctaaaacccgcatctcttctgcgatcttcaactgaataaagaccaccaaccatgtcagatacatttggctttaataaaccagtaccaaccacaattaaggcaattgaagcatataacgccgttacaccggctggaagtgccaagacaatgtgacctaacatgatcaaaacgccgccataaaagacggtttttcttgaaccccaaacacggtcagacagccagccaccaactagggttgataaataaacaagtgaaccatagattgacatgattgatgcagccgttgtttggtccattcccagaccacctttggtgactgcataatacatgtagaaaagcaggatggcgcgcattccgtagtaactgaagcgctcccacatctcagtaaagaataacgtggacaaaccctttggttgtccgaaaaatgctgtatctgaatctcgtttacccaaagaaaaactcccctcttatctaatgtaagcaataaaggatattataccacgaaaaataaggatctacttcttacatcaatgtcattaagttaagacattgacaaattgaatctaatctctgtagaaccgaatcattatgatttagttctttttttgcataaaataaaggcgaaaagaacctaccttttcgccctctgattaaattattaaaccttcaaaattattgccagaaagctggtgttaattatgaaagcccttcataaaaatattttagatcgtcttgatcaaattatcaatgatactggaaagcatattcatgattttatcgatgatcctcatgccttcactaggaagcggtctttagatgcagctacagtcattaaaactactattaatatgcaaggaaaagatttgaccagtgagttgtttagagcttttggccaaaaagctattaaaaataacgataaagtagtcagtacttccgcttatgtccaacgcaaaggttcacgccgttgacatgcacaagactgacctggacggcaaggaactgaccagctacaagctgcaaaaggacctgcgattccacttcgacaactagtacaataacagaaattagccaatatacagcaaagtgtctgggaagaaactcgatttttagcccggatataaaaacacagaaattcattatttttagtgaattcctgtgttttttgtttttgaaataaaaattcgaaggcttcaccttcttgttggctccatattttttcttaaatgcgttctgcgcataccaaatacactcttcatgtgcccaaaaattggctccacatctgacttgcgacagccatagatgcgtttaccttcttcgctttgaagagtctcttttgctttttcttttaaatactgccaattaggattgtagtgaatctgtctttgtcgacctgttttggttttagccaattgggtcagttcttcagttagctggaactcatcagcttcataaattttgaagtttctgaccatgccagtaaatcgatcttttctttgactataatatttgaagttgaagcggacgcctgatttatctacgtaatagtcttcttcttcgttatagtaccagttgtcgacctttgatggatctttcttatattttcgcgtttgttctttttcgtattgggtatacggaatctgatagttcttatctgaataattctcttccagaatcgagtaattgtattcactgccatagcccgcatcggccacaatattttgaaacttatcgaaaattcctctggacttcatttgttctagaaatagttcgaatattctaaagtcagccggattaggaaacagggcaaaatcaactatatattgattagtagtcgctgcctgaatattgtagcctggctttagctgcccgtttttcatatgatcttctttcatatgcatgaaggtggcatcatgatctgttttagagtagctgttacggccagcaaagatctcttcagcttcttcgtactttttagcacgcggaataaaatcttttctaagtttatgtgcgatcttctttaattcacggcgcttggccttattttttgatccgcctggaatggctttaggttctcgatcaattttctcggtcagcttctcaacttctttttccgtttcttgagccagaatctctaagccttgactagtttgggcttcttcttcggccatggctttgactacttctttattgatcagttcttcatataaagcagacacgtcttcctttaacttggcatgatacttctcaatagcttttcgccagacaaaagtgtacctgttggcgtccgcttcaattttagtaccatcgataaaaactgcattttcacggattaatccctcatcttctaataatgaagtaaagtagacaaaacactgcttaattaccttattggcatggtcgcttgatctgaaattattgatcgtgtgataagaaatctttctattgtcagctaaaatcatcatgggcagattctcttctagcattctttcaatttttctgcctgaaaaaactcttctagaataagcaaagagtaaaatcttaagcatcattgccgggtgatatgcaggtctgcctgtattagaagtggtttctaagataacttcgttaggaatagaatcaacgaattcactgataacactggcaatgtgatttgcagggatagaaaaatctaaatttaatgataaagtagtttgtcctgtgatataattttgatacatgtttaagcccactttctattgtttttttgtggtgattaaataatatcaaggaatgggtttaaagtatacaaaaagagcgatgacttcttatgaagttcatcgcttttttcatggcctggaaattagttttttcccagacactttctattattaaactagatcatacatttctggcattctgcaccattttgaattaaacattcgtctgcagtcaagttctcactaccagctaaaactttttctcttactctaacataataaattgagttgcatcgctttttaaaggcataaatataagccttatttaaatctcttgttgttgcattatcttcaacaaataaagttaacgaaattgattgatcaacatacttttgtgcagcagctgtaatatcaataatagcattaggtcctacttcatatgcacccttttcgtaatactcataattgtctttattaatcttataagctggtacataaattcgacccaaatcagcctctttgcgtgtttcaacaggagctactactggctgcaaacttggtgtacatgaagataaataactaattgatccagtaggtgcaactgctaacaagttagcattagctatacctgtctttttaattttagtaatcaattcttcccaatcttctttagttggaataactaatttatatttagctacaatttctttaatcttgtctgttttcggtgagacttcctcatcaataaattttttgaaataatcaccactagcatatgatgaatctttgaatcctttaaaagcaccatacttttcagctaatttatttgattctttaaatgcatggtatgcaattgtataaaagaaaattcctgtaaattcaactgcttctggtgaatcataataaatatgattagttgctaaaaagccatgtaaattcattgctcctagaccgattgctcgattagctttatttcccttttcaattgaaggagcacaatctaaatctgaagacctggcaacacgattaagcgcttgaacactatcagaaaccaaaccacctaacttgtcagcgctattcattgctgctgcaatattaagtgatcctaaattacaacaaacatcgtagcccgtcttattaaaacttaagtcttcattataggtacttggcgtattaacctgagcaatttctgaacataaattagacatcacgatccgccccaatttcttttgtgggtttcttcgattgacagtatcttcatacataatatagggataccctgattcaaattgaacttcagcaatagtttggaagaattttctagcactgataaatgtctttttaatacatggattattaaggagattttggtattctttagtaattgaaatatctgacattggtttaccatattcacgtttaatatcatatggtgaaaacaaagccatctttttattttctttggctagttcaaaagtaatatctggaatcactacgccaagtgataaagatttaattcttaccttttcgtcagcgttttctcgtttagtatctaaaaattgcagaatctggggatgatgggcacttaaataaactgcaccggcaccttgtctttgccctaattgattggcataagaaaatgaatcttctagtaatttcattacaggaattatcccactagataaattcttcatttttttaataggtgcacctaattcacgcaaattagttaagcatagagcaacaccaccaccacgtttagataattgcagacttgtgcttattgctcgtgaaattgattccatattgtcttcaactctgagcaaataacatgaaacatattcaccgcgtctctttttacctgcattcaagaaagtcggagttgctggctggaaacgattactaataatatctttaactaaattcaaggccagttcttcattgccatcagctaaaaataaagcattcataacagcccgatcttcaaaacgttctaaaaattgtttattatcgtttgtttttaaggcatatgctttatagaatttagctgcacccataaagttcaaaaagctaaaattttgcgcataagctaatttgaaaatttctttaataaatttagctgtatataaatctagaacttttttatcatagtaattattatcaactaaataagctaatttttcttctaaagaagcaaactttttcattcttggttcaatatgattttcaagatattgcttagtagcttccttgtcagctttaaaattataatttcctttttcatctttaaatttagcaagtgcatttaaagaaatatatgaatcattattaagatgatcagtcattgtcctcacctgcatcagcaattattttattaacattatttacatcttcagttgttcccagtaactcaaatttatatagataaggaacatgtaatttcttagaaattacatcccctgccaaggcaaaagaattaccaaaattggtatttccactagcaataacaccaatacatttttgccgattagccaatttgttcaaaaagtggataacttgctcaggcacagcacctgtagtcccatggccaccagaataagttggcgtaattaaaatatattcttcagaaactgaaatttctttactgagtttaataggaatcctaatagaattacaatctaacttttctacaaagcgtgctgtattatttgaagtggaagaataatagacaactaatggctttttagaaatcccagtcatcatctttagtctcctctcctgttcccattacatatgaagaaccattaccagaaaagaaatcatggttttcatcagcttgagctgataattgagcgaatacttctggggaaatataagtttcttctgcggtaaaaggagtatcatagcctaaattttgtaaaaatttacctgcattatacaaactgaaatgaattgcatcatcaaccaaatcaaaatcatcataaagctcgtgcaaatatttcttttccaaatcaattagtttatctaagaaatcaaaaacgaattttttcatttctgcttgtttagctggagctaatttctttacggccaattgatatttgtaaccactataataattgtgaataaccttatctcttaagatcaatctaataatatcagcagtattaggcaatttacctcttgcagctaaataaaatggtaaataaaaaccaccataaagcaggaaccctggcataattgctgcggcaacctttgatttaagcggatcattgcctgtataatacggaattaccgctttagctcttgcttgtaaagcatcattattaactacccattcatgcgcttcttcaatttgttcactagtacataaagtagaaaaaatagttccatatgatcttgcatggacagcaaccataaaagcaaaatttgcatagatagcttgctctatatcagtttgtgaatttttaatttgggctacatcacccacacttgattgagttgtatctaataaagtcaatccagtgaaagtgcgagttataagctgttgccagtcatcagataattgattccaagaacttatatcattcgaaactgggattttttcaggtaaccaaaagttttgagtaactctgttccaaacctcaagatccttatcatctttaatgtcattccagttaatagctcgcatatttttgccgttgttattgtaagcaaattcaactggtgactgtgaatgatcataataactcatatatttgctcctatcattatttattgttttatctaatatatgtgtaaacatactatagcatcgtctgctcaataatacaacatgtggatttttggggttatttataatcgatatattgtggttaagccgttttgataatacaaaattattttcaaatttattttatcttccaaaaataatgtaggtgttgttttttgcttttttgacaaaaaaagtgtctgggaaaaaagtcgatttttaactaaatttaggctttaactcaaaaaaatcccattaaatcaaggtttgtatgtaccaagatttgatgggattttgaaatttctgagttttttcccagacacttttttcatggcctggaaattagttttttcccagacactttcttttgcgatttttgctttatttgttagtaccatctgctcctactggcagggccgggaaaataaccgtgaaggttgaccccttgcctaattcgctttccaggcggatggtcccgtggcactgctgaacagcatgcttgacaatggacaggcccagaccagtgcccccggtcttgcggctgtggctcttttccacccggtagaagcgttcaaaaatccggttctgggcttcctggggaatcccaatcccagtgtctgctacctgcaggatcgcctggccccggtgctccttgaccgtaatcttggtcttgcccttttccttgttgtagcggatgctgttgtcaatcaagttgtaggcaatttcataaaccaggcggaagttggccaggatcatggtgtctgacaaattggtctccagcttgattccatgccggtaagccgaaccctgcaaggcttccaaggcctcagtcaccggactcttcaagttcagcttgatttcttcaaagcgctggttttcatccaagtgggacaaacggatgatatcgtcaatcaaggtcaaaagctgggcggaagattcatggatcttcttgtaaaagccatcccggtcttcgtctttgaccaggtggttttccaaaagctcagctgaccccatgatggactgcagaggcgtcttaagttcatgcgacacattggccgtgaattcccgccggacctgctcttcatggtattcttccgtcacgtcaaccaccaagatcgaagtccccttcaaaatcttgcggctgataatcgggctggcactgatttgaatattgcggccgtttctttccacaatcccctcagtatgagccaagcggctgtttttatcgatgatttccttaacatcgtctggtaaggggtcagtgtcatgcaggcctaaaagtgaaactacagccgggttagacaaaagaatccagtcatccaggtcaatcaagatcaagccttcttgcatggcatctgttaccgtctttaattccttttcccggtggtgcagctgctccatttggtcagcgatctgcttgttctggctgtccagcctggtcaagagcggcttgatttcatcataagccttgctttccaggggcttgtccaagtccatttcattcagcggcttgacgatcgtttgcgagagcggcttggccaggaaccaggacactaaaaccgccaaaagcatgatcagcaaaagcggcgacaagagcctgagcagcatccgccagaaggagtttctggtgatcgcgatgcggatgaccccgccgttattgagccgttcagcgtagtacatggtcacggtcgacaaggtcgtgctgtagcgctcgctggtccccgtccccttcttcatggcttcggcgacttcctcgcggcgggcatggttgcccatctttttgggattctcttcattgtcgtagagaaccttgcccttggaattgatccaagtaatccggtagttctccccttttaagttcttgaggtacttcttgccgctggtatttaccccgctggccgccaggtcagcctgggaagctagggcagacatttctgtatggtcgaagtcaatgctcaagacaatcgtgcttaagagtacggcaaagaagagaaccagagaagtcagtaaaaaacttgcccgaaatatcttcttaaacattagtctgcttcatggtagcgataaccgaccccgcgcagcgtttcgatatacttaccagcctcacccaacttctgtctcaaggttctcacgtgaacgtctaccgtgcgcgtttccacgtaaaaaccagtctcccagatctgatccatgatttcttcccgggaaaatacagttcccggatgagtaatcaagagctttaggagtccgtattctttcaaagtcaaatcgacctgacggccgttttcgaaaacttcatggcgctttaagagaatcttgatcccgtctttttcgatcttgtcctccttcttgcggttggttcggcgcaaaacagccttgacccgggaaaccatttccatcatcccaaatggcttggttaagtagtcatccgccccggaatccaggttcttgaccttgtcatattctgccgtcttagcactggcgataatcaccggcaagtcctcggtcgcggaagtatacttgagccggtggagaatttcgctgccgtcttcatcaggcagcatcaagtccaaaatcactaaatccggccggttattgtccaggaccttgaaaaaagaatgtccgtcttcaaagccgcggaccttgaagttcattgcttccagcgtgtacatttcgatttcgcggatgctttcgtcgtcttccacgcaccaaatttcagtcataaaaaatccccttagcctttcttaaacttatttatagtttaccatttacaagagtgttaaggggtatttcatgggattatctgccagtcttgccggtagttacaaataaggaccatttagcaatattgacggcgtgatcgccgattttttcaaagtacttcgcgaccatcatcaaattgatcaaatattccggattactatccttgttaaagttatcgatcaaaaatgccttcgctttgccaaagtcgtaatcgacctgatcatcgcggtcgattacggctttggccagttctacattctggttggccaaagccgttaccgcgtcgttgaccatacaagtagcaattttggacatgctcttcaggttcagcatgtcatttgcgtctgagaggtgttctttaaggatcagttcggcaatgtccgcgccaatttcaccgattctttcaaggtcgtagaccgccttcaaagatgcactgattatccgcaagtcagtggcaaccggctgctgctccatcaaaaggcgcaggcaggtttcttcaatgtcacgctctgccttgtgaatccggtggtgcaggttaatcgtgtcctctgctttatggtagttgcccgtaaacagggcgtcggttgattcagaaatgctttccttgcacagctggccaatttcttccattgcttcatgcaagtgatccagttccttgtcaaatcttgttctcatttttagcctcctatagccttaaccgaaccggccggtaatgtatttttcagttctttcatccttcggcatggagaagagctggtcagtttcaccgaattcaaccaggtcacccaagaggaagaagccagtcttgtcagagatccgcacggcttgctgcatgttgtgcgtaacgataacgatcgtatagttcttcttcagttccaaagctaattcttcaattttagaggttgaaatcgggtccagggcactggtcggttcgtccatcaacaatacttccggcttgacagccagggcccgggcgatgcagagcctttgctgctgaccgccggacaggcccaaggctgatttcttcagccggtccttcaagtcgtcccagatagctgcttgcttgagggaagtttccacgatttcgtctagttccttcttctcagtaatcccgtgaatccgcgggccgtaggcaacattgtcgtaaacgctcatcgggaacgggtttggtctttgaaagaccatgccgactctttgccgcaggacggtcacatccaggtcaccgttatagatgtcagtgccgtccagcttgatcgagccatcaatccgacagccttcaaccaggtcgttcattctgttaagtgatcgcaaaagagatgatttcccgcagcctgacgggccgatgaaggcagtgacttcgttctttggtatgtgtacattgatgtcatgcaaggcatgaaaatcactgtagtacaggttcagctttttaattgtaattttgtcttccatcattaatttcctccgttattgcgcttgcgcattctgtcagagatacggcgcgtaaccaaagtgaagagcagggccaaaacgaccaggactgctgatgtaaagttggcaatctgagtggctgacgggttcaaggccccttcagttctcatggcccagatgtgcagggacagggtttcaccgcttcggaacgggttcaggggtgaacttggtgagataaccttccagaagttctgccagttgatgtaagttgactggccggaagtatacaaaagcgcagcggcttcaccgaagccgcgcccagcagccatgattaccccggtcaagatctgcggcatggccgccggaatcaagaccttgcggatggtttctgacttggtcgcgcccaggctcagggaaccttccttgtattccaccggcaaggaccggatggcattgttggtttcagtagttatcagaggaatagaaagaattgaaatcgtcaaggcaccggccaagatattccaggacatcccggtccacatgatgaaggccaagtagccaaacaagccgataacgatagatggcagggatgacaaggattcgatactgatttcaaatattgtcaggaacttgccttccttggcatattcagccaggtaaaccccggccccgatgccgattggcactgagaccagcagtgagaggaaaactaagtaaatagtgttgaaaaactggttgaaaatcccgttgccggctgctcccaagaagtcccactggaagcctttcaagccgtcaaagatgattgtcagcattaagtagagcaggaaggccagcataatccagccgatggcgtagaagattcccgtcatcagccggtcttttattttagcacggctcatatttatttttccttctttccattgccaagcttgtgaatcaatataatcaaaacgattgagatgacgaagagcaagagagccattgaccacaaagccagattgtattccccgccctgggccgtgttacccatgtcagcggcaatctcactggtcaggttgctggttggtgacaagagactggtcgcgaaggaccgggtcttaccgataaccatggctacggctaaagcttcaccgatggcccgggccagacccaagaccaccccggtcaagataccgccgaaagcggctggcaaaacaaccttgccgatgacttgccagcgggtcgcccctaaaccgtaagccccttctctgtagctattcgggactgacttgatggcgtcagcggcgacagtagtgatcgttgggaaaatcatgatggccagaacaattgaggcggccaggactgagaaaccgcccatctttgggtggaaggcgtttctgattataggaaccagcttggtcaagccaaaccagccgtaaacaacggatgggatgctgacgtagatttcagttgccggccggaagaacttttcgccgatttttggtgaaatttccgtcatgaaaacggctgagccgatcgcgaacggcaggcagatgaacaaacccaacaagcaggtttccagggaaccaacgatgtaaatggcagccccaacttttcccccgaacatgccggtcttgtcaagcggtgcccagtcactggtaaacaggaactcccaaacgctgtggtgcgccttaaggaaggtctggctgccttggtagagcaggaaggcccccataaaaagggtcaaagcaacgatcaagaggccgcaggcgatgtagtccgcgcgccagcgcttgtctttggcaattgctttttgaactactttgtccataatgctttatttctccttcttacttattagcatgggtggctttagcggcagccagcagtttggaggctacgccgtagcccatggcttcgatcttcttgctatattccttgctaagcatctgctgcaagaatgccttggcagcacccttgggctggcccttagtgtacatgtgctcatagctccaaactgtatacttgccattatagacattcttcagggttggcttaacaccgttgattgacacgatgccgacttgcgggtcaccagtcaagtaggacagggaaacgtagccgattgagccggaaacactttggatcatttgaaccaaagtacctgagtcgtcagtttccagagactggtttgactggctagcgtgcttcttcaaagcgtattgctcaaaagttgcccgggtacctgatgaagatggtctggaaaccaggacgatctggcagtcattgccgccaacctgcttccagttggtcaccttgccggtgaaaactttgatcaactgttcagtggtcaggctcttgactccagcatccttgttgatgatcggggcgatggcggtaatggccacttggtggtcaactagcttgctggctgacttcttgtctagcttttcatacgcgaacaagtctgagtccccgatgtcgatggtgccgtcagaaacctgcttcaggccttggcctgacccacccccgttagtgttctgtccgggttcttgtccatgaaagtcttggccgcgctctgcgctaaaggcagaagggcagatgacccggcgatgttaactgtcccggaaactcccttggtatcggctacgcagctgtcgatgacgcagccggtgacgattgccagcaaaacaagtgcaacgatggcgactttggtttttttgcgtgacatgttaattcctccttgaattcttactgattcaaccttaatggaggcaagttaaatgcattcagtgatgattgttaaatcaatgtaaaatgtttaattttatttaagcccagccgctttcttaacagaattacaaagttttcgcaaggctcccctttacttttcagtttattttgcttaatttatccgttttttacatttgtaaaatatagagctttcactctttacaccttttacatatcgcgcaatattaggatataagtgttcttcttcagtccactcaaagaagcgtttaaccgcaactatataattctggattgtggtcggtttcttgccacttgcctttaaaaattctctgtactgtcttacagtgtcgggatctggatgcgtgatccccttttccctcatgtagataaaccattgcttcaatgaagttcgataagtcctaactgtattaagcgaaccatcaataaatatgacaaacttatcaaaaagatcatccaagttgctatgctgaaaatccaactgctttgagcctatcgaggttaccagttcaccgcttatttttcttattggttttatttctaccatcctaacattcacctactttgttactatgctagcttattacattgttatcttgctatattgctataccagcattgtattcttgtagtatcagattacttcagcataatgttacatttttgtcccctaatatgacttcgaaaacgggcttctaagcttaatatacttgttatatgttcaatttattcataattgttaaaaaagctctgaaaagcgaatttatcatgcattatggacttacaccgctccttatgctgaataccttccaatgttgttgggtagggggggatgcagcaccaatatcaaccaaataaaaaggggctagctctgaagctaacctcattcattaaacattaaaagtaaatttataaataagtcatacttgggtttttatcgctatggtttgggtttaaacacgtgaaattgtgctttatattaataccctgcatctgcaaatattgaccaagcagagcttttaatctgtcctgcgatctattattattgttttggatattcattttatgtataccttcatttttataaattgattgagtggtaactggtcagagttgctgctcattttattttgccaataagtcagccaataaggtggtagaagctgtacttcgtactaacaatattaacgaacatacttagaatatagggttacgggcaatgtcattaagttaaggcattgacttttttacctaaaatcaacttgattagtgggcgtttatttactttgaaagtctatcctaaaacttgacaggagggattaatttgagcgaagagaatcaaaagaagctgtttggcatctcagcgattatttgcattattttattaacgattacctattttggtgatttagccatcagcaataccttaattaattatcacagctgggtagggacgttttgtcagacttttggcgagtttccggtttatcttatttttgccttatgtggacagattacgatgacttatgcctggaaaggcgactgtgaaaagctgctgggggcaggaccgttgtttgttggcgggcttgcactgtcgctttggcagagcaagaagtatgtcaatgaattcttgggctatctgtattcggtacaaactaaccttaaaaacggtaaggcgatagcaatggccaacagcgactcagtaaagggcggttatgcaggctcaatgattataatggtctggctgttgtttttcgttatatttacgctgttggtacaatggtggctgaaaaacaaaacgactaaacagctgactcgctatatgaaaattgcgattttggcgtcattgacggtttggtttgcattggaagttaatctgaccttaaaagacctgtggggacgctatcgcccatatgaactcacgatcggtaatcatgaatttaccaattggctgacgatcaatggcgttaatgggcataagtcattcccatccgggcatgcgatggcggcaacgttatgcatcgttttttcatggttcgtttccaacaataagcataagatctttttcattggtggcatcgtttatggtgtcgtgatcgctataagtcgagtaatcgtgggcgcacatttcctttcggacgttacgttctcgtttttcctgaccgtactgatcatctttatcatgaatggtcttggtaaaaagctaattgaagatttttaaaaattagggctgtgaccatcgaaaggtgaccacagcttttatttatgtgttaaaagtcatgagaatacgccacctttgataaaatttctaatcaaagatagcgtaaagcggtttcaaaaattaagcaaaaaacactcatcaaattctgatgagtgttctaagacgttctccgttcagagtcaatgtcttaacttaatgacattgcttcttacatagtggatccttatttctttagctatttattttttagtcaattgccttagcaactgcactgtttacagcatctttttcgtcttcgattaagttaaccttgccttcgatgaccttaatgtccatcttaatttcacgactaagaagtggaacatttaccttaggttcaaagaattccttgaattccttaagtctttcaggagtatggaagacaccggtagtaactgtgataaatgtagcgaattccatgtcaccaccaacagtcttgtcaagccaatcccagtcttctctgatccagtcccaagctgcttgttgaccataatggttagcaagtaaaccacggtaccaaccacgtaaatcttgtggcttaactacgtcagcattttcaaagtcgctaacaatagccttgatagctgcaagatccttggtgctggttacagcgctgcgtaagtcaaccttgtatgatgggtcagctgttctttggtattccttaattaacttatcaactaattcagcattgccaaagttcttaacttcattgattaaaacgtatggacgaatatctgcattcattgcctctaagttgtcttcattagcagtgaaaatctcatgagctgttttaattgagtctttattttcagcgtaaagactggcacttaattcatatggacgaatttgtgcatcttcatcgctttcacctggcttaactttccagcccaaacgagcaacttgaccagcggataacttgtcataaagcttctttaagtccttttcttgagctgattcaggttcaacaaattggcgcaacttagcagcagtagcgtaaagagcattaataactacacttgacttcgagtcagcaaatttagtcaaaagtggcacaacagcagcataagaaatttgtttaccttctgctaaaagacgtaagtcttgcaataattgcaatttggcaattggatcaagttcatcaacatgagccaaaatatcatcaagcaaagtcttgtcatacttaacgataaagtgcgagttgttacctacattaattctaagtgggtgacctgcttcactacgtaaattcttgtagtaacctaagtcgatttccttatcagacataatcttaggtgccttgaagttagcattcaacggaatttgccattgtctaccaacgtctttaccttcaccaacgaagaattgttgttgtgaaagctttaagtgaccatcgctactatcaacatatgcactaactactggataacctggttgctttaaccatgagtgcataatcttgccaatatcaaggtcagttgcggttgaaagagcatcccaaagatcgtcaccagtggcattaccgaacttgtggtggtcgaagtaatacttcaagccttttcttaaggcatcgtcaccaagaagtgaacgaaccataactagcattctagaacccttagcataaacaatggcactgtcaaaggcagagtcaatatctgctggatcattgatttccatttgaattggttgaacaccgtcagtagcatctctagtcaaagctgcaggtgcttcactggtttggaacatttcccaaatatgccaatcaggttctagaccatcaactgacaagtattccatcatgttagcaaaactttcgttaagccataaattatcccaccatttcatggttactaaatcaccgaaccattggtgagccaattcgtgagtaataactgtagcaaccaatttcttcatttcaaggctagtattgtctggatcaagcaataaatatgcttcacggtaagttactaacccccagttttccatggcaccagcactgaaatctggcaaagccaattgcaatgattgtggaagtgggtatttagtttggtaaaattcttcgtaaaactcaattgcattcttagcaacatccaaagcaaagtctaattccttaggtttgtgtgctttggttgcgtaaacaccaattaaaacgccatccttggtatgggtagtctttgattgcaaatcaccaaaggcaaaggcaaccaagtaactagacatgcgaacagtttcttcaaagtggtggtagccgtccttgtccacttcaacttcaggcatattggcaagagcaacttcgccatcttcttcatcccacttaagggctaaagtaaaggtagccttagcttctggttcatcgatacatgggaatgcttgacgagcaaaagtggtttcaaattgagtaccgataatttgcttcttgacaccatcaacttcgtaatatgaaggataaatacccatcattgtatcagtaagtggtgcactgtattctacttcgataatcgccttaccgtttttgccagtttcaattttaatggcttcgtctttttccaatacatcaaaaggaacatccttgccatcaaccttaacgctatcaatggtcatgttcttttgattaatgaaaacaggattttcgattacttcaccagtaacagttgaagtaccattaatttccttttgcttacggtttacgttaatacgtaaatcataatgttctgggtggaaagtttcataaaaacgtttaactgccatatttttcctcctaattaatagatcatttacttttaattttaccaaaataagcgcgaaagcgctcaaaaaaggctatttcttgttgattgtaaggatgacgtttcagttctgtaacattgctgtcatattgagcttgtactatagaagcatagtcattaagaaataaataagttttgaaagaattaattaaatttaataaggaatgaatacatcaatgaataaacatgttaaatctactttagtaaaaatcttagctgccttagcacttgcctttgcttgtgttgcagttgcaaatgctttttctaccaatacttcaactactcaaactgttcaagctgcaagaaagctttcaaaagctgaaaaagctgctaagagatggatcgcaatgcgcgaatcaggtggtagctacactgctagaaacggtgtttgttacggcaaataccaattaaacattggctacttacatggtaacctttcacctaagaaccaagaacgtgttgctgataattacgtttacggtcgttacggttcatgggttaacgccaagagattttggttagctcacaactggtactaaaattaaattcctttaattcccaaaagctaaagaaaaccagcttagtccaattgactaaactggtttttgttttactcaaaattatcttgcttgataaaacgataaagtgcaatgactaaaactaagatcgagcacgccatccctacataggccattgttccaatgtggacagcattgttagcagcttcacgggctacttgattttccattgcatagcccacaacccatttacgcattaataccggcgtcaagacaaaactaactgtactaataattgaagtcactaacgctacattacgcgaatatggttctttaaagaactgtgctaatacgcagaatgctggagcaatcatcaatagcaagatccacataataatccagcgcccagaacttgaattcatcatctgcgcactattagtggcataacgatatgagctccaaagcgatccaccagataaggtattaagcaaactcaagaaataagatccacgttgtccataaacaccaccattattggacagaataccttgaacaagttggaaactatcagttgatccagccgatgaaaaatcgaccgacacaacttgcttcatataagtagctaaaaacatggtaactgagccacctaattctagtgctcttaacatgcttaattttcttgaagctttcagatgaaattccagacttaaaactcgatcaggatggtgactgtgaccaatgataaaaatccctgcaatgacgatcaaggctaagataaccaatccccaccagaatttaatcatggcgaaaaataaggctaaaacaataatcgcaaccgaaatatatggtcggtcagaaaaaatattccaaaagttcaacttaacatgatggtaatttttccttgatgcatttgcgacattttgattaataatcggctgaggattactaatttttctgctgcgaaattcttcacgtgttgttgctcttgtcttagtataatcggtccgtgaacgatctgcgccggcttggccgtgctcttttttcatgcgatattcacgccgcgacatatgtgccataaactgcagcccccttctcaaagcactatagtagcacattatcacttttttgcttgaattaagaatgaaatttcaaagaaaatttagctttgttttgcatgtgctaaaatgaatattaataattgtgctttttttagaaagagataactttttgaataaaactaaatcagcaaaactgccagctggttggcatatggccttttataccttatggctcggttgctttatcactgggatgggctattcaatgacaatgccctttatttcactatttatttcagatttgggtaattattctaaactgcaaatcaatctttattcaggattagcttttgcaatgacttttattgcccaggcaatagtttcaccatattggggcagcctcgctgaccgcaaaggtagaaaactaatgtgtatgcgtgcttctggtgtgatggctttaactattaccctaactggatttgcacccaatgcaatttatattattgtaatgcgttttattcaaggttctttttctggttatattaacaacgccaccgctttaatggcaagtgaaacgccgcatgaacgtagcggctgggtcatgagtcaaatgatgacggccgggactgccggaaatttggttggaccgctattaggtggtgctctctccagcttctttggcaatatgtttggtggcgcctgggggtatcggattccattcttcattaccggtgttttaatgttcatcgtctttttaggtacaacgttcttagttcacgaagactttactccaatttctcgtgaaaagatgacgccgatgggcgaaatcatgaaaagtttgcctagcgtgaaattgattgtggtgatgtttattactaccatgttggtacaatcatcaaccatgtcaattgatccaattgtttcattatacgtaaaatcaatgatgcctcatggcggggatgttgcctttgttgcaggtgttgttgcggcaacgcctggtcttggaacgctaattgcggcatcgcgaattggacacaagatggatgaagttggaccgttacgcgtattgcgaatcggcttagtcgtcggtgccgcattgtttgtaccaatggctttgactaattcgccttgggtactagcaggactgcgcttcttattagggattgctagtgcagggatgttgccagccgcacagacggtattaactttaaacacaccaagcgaaagtttcggtcgaatctttagttataaccagtcatttcaagcagttggtgccgtgttaggatcgttaatgggatcgactatttccggtttttcaaattatgcaacggtattctggctaactggatttacgttactgatcaactttgtgcttgttttgatttttgcttggggaatttcttatcggaatagataggttaagcatattcctaaagtatggaatttaaaaatgtaataaaagagctgtaaatatcacaaaaaaatatttacagctctttattattttcaattttttacgctaccatcttttcataaatgcgatacatccgattatcataagcgcacattgaaataacaagattatagcccgcgttttctttctgccacttttcaatcgcgtcaactgcgatcttagttgcatcttctgcaggatagccatacacacccgtagaaatagctgaaaaaattacgctatgcaatcccgctttctttgccaaagccagtgaattatagtagcaagaagcaagcatatgtgcatcactagtcttgccagcataaactgggcctactgtatgaattacatatttcgcaggtaaattatagccatgtgttatccttgcttcacctgttggacaaccatgcagcgccatacattcttcaagcaaacgtggaccagctgctctatggattgcaccatcaacaccgccaccaccaagtaatgaattattagccgcattaacgatagcgtcggctttcatcttagtaatatcgcctttaataatttttatatttttcataatcatgtcctcagaaatacccaacatttctttccacccccattctaacaccaacaacatcagttaggctcagaaagaatacaaagcatattgttatttttatattacgaacttgaattgatttctatctttagtatcctaatattaagtttagcgttataggagcaacgaaatgaaaattctacgacgcagtttatgcatcatttcgatcaccttattttcttttgctttgagcattctcattcctagtgttcaagctagcaaaacagttttagatgatctcatcatatttttatatttaattggaatcgtaattctgggcattctgttgttgtctaacaaatttgattacctatcactcagtctaagcataatcttgctactcgcaactatcattgcttggatcagattcccaatgattagcattatttatactttttttatcgcttatctaatcatgtgcttactaactattttcattgtcaaaaggattaagaaataaatttatgttttctaaaaaagaactaaaaatcatcaatactacattaatcatcatatatctgctttcagttggcccaacattcatcttcggttttactaaatcaaatgatttcacaagtactttctttttaattgcaaatatcattttagtttgtttattcattatcattgctatcagaattgctaaaatcaatttcaggctaaagacacaatattatctactaggcttcatcactcttatttcaataatagaactagcctaccctggactgacattaaatgagcgcattagcaattattttgctatcggcaatattattctaagcttgctaactactaaaatctcaaagaaattagtttaaatataggacacaaaatgaaatatctgaaaattccaagattaattaacagtattttgattactttacgtcatactgctataaattattgaattcttattactttaaaactacatcaggtattttcaatcattcaataaaaaataagactagcactaagccagtcttattttctattaatcaactattctttgggtgagaattgccatactgttccatcttggctacggtatgagccatcactcatctttgtaaatataaagacaacttttttcgtcctaattgtgtaaccgttttttgattcagttgtatcaactcggcccaaatcagccttaacacctgtttggggtggattatttttcttagtagaatatgcttgtaaaatttctttattaagtttagtcttcttttgctcagagttgttactatttttagcaactaaaatagcatgattctttgtaaaatacagatcaaaccaattacttaagcgattttctgtgttgtctactgttaatgttcgattaacccagtttttaggtaccgttgtttgattattgtagaaaaacattccaccaataactgctacaagtactgtaactactgcaattacggataacgtcattttctttttcataatacgtttcctcttaaattcagcattaattatttggcactaagcctctcgaaataagtcttacatttcctgaatacatgctaacccatcggtttctatttgttttaaaattgtgatccatccaggtactgtttctatacaaatagccactgtaggcaccatcattataataaaccttagacggagttgtattaagtaaattcatagcatcccctttaccccaactactatatctataaacattagatacatacttgtgaagtggagcatttttgatcggtccatagactttgactcccttagtttcttgaaccgtagtttctgatgcttgaacacgttgattatttgtagccaagactgtagctgcagttacacctaaaagtgtagcagttgtcaataatacttttttcatttttatttctcctcgttttgttctaattttaataatacttttttgcgagccgaagctggtgcaggaatgttcttaacatcataactgtatagataccctctatacagagtagtagcactttttcctactttttcacgcataacttttgaaagatatcctctatatccgttgtattcaaagtaatgagtgggaccataatcgcaacttgaacctaaagtgatccaaattctcttaggcttatagtaatctgctcttaattctgaacttacagttgattgtgtttcagttgatgcatcaactttgcttgaaaatgtaagtaaagttgtaccaactaatcctactaatgacaatgaaactagctttcttgaaattgatttcatttttatacctccgtaattatcaaatgacttatacaaattatctattctctttttctcccatcctttcaacacctggcttgacatttaatttaggtatttcaaaagtatctatactgcctaaaatgacaaaagccgttataattgtaagcgtaagtttgtttctttttcttttcatcattgaggtaatctttatgtacggtaaaaaatttaaagaaatcagaattaagcagaatatatcattagaacaagcagcaaaagatgttgtttcaatttcaactttatcacgctgggaaaatgataaattagacatcaatttttctcaactaaaccacttactcgcaaatatccatttaacattaagagaatttgctagatattgtgaaattaatccatccgatactttctcaattaaagctgcaaaagcatataattcagatgatattaatcagttgcatgcccttgctcaacaacaattagataaatactatagttccagagatagatacgatctatttttaacagcaattgctaataattattattttgacctgactcaaaaaaatattttctcgcaagaagatataaatcgattaaattatctattctctcatgttgaatattggtcagaattttacataacagtttttgcaaataccgtttttctgattaagccagaagttcaatatcaaatatgcaataaaatcttaagccagctatatttacaagatttttctagctgggatatttttattgattctattggttcaatattaaattcactaactagtttgattattagcaatcctagcctagcccaaaagctgttagaaaaaatcaataaattaccaattcctattcaatgcagctatatgaaaattagaagaaactttttagataaattacttcattatcgattaaataaagataacgaaaatgaaatcttaaacattatttcttcacttaagactcttggcctacctcagattgctcacaacttttctacactttttactcgtattaaagacttgtaatcatctccttcttatttttatgtttttataatactctcatatctatttcagcttcaatacttttgcagatttgcaaaacgaatttaaactccatacaaaaacgccttgcccgaaagcaaagcgttttttagcataagcaatttttgattaacccttatctgcacctgcagtaattccgttaacgtagaatttctgcatgaagacaaacaagatagtaattgggatagcgatgattacacacccggcaacaaattgtgcgaagtatgcagtcgcgttacctttagctgtgtgcaccatgttatacaaaccataagcaactgtataagtcttagcatttcctgaagttgaaagaataatacctgagaaaatgaagtctgtccatggagcgatgaaggcagtcaaagcagtataaacaatcattggctttgaaagtggcaaaccaatatgtaagaatacttgccacttagtagcaccgtcaatttcagcagcttcgtcgattgaccgaggaatagtatcaaagaatcctttagcaacgtagaagcccaaaccggcaccaccaacataaactagtaacaatccgaagaggtttaacatgttaagacccttcaagatgtagtacaaagcaatcattgacatgaagcctgggaacatccccaataccaatgcgatctgtaagaatggctttctaaatgcaaagcgaagtcgtgataaaacgtaagcaactgaaatagtcaaaaacgttgaaattaccattgaaagcaatgaaataactaaagtattaatgatccagttaccaaatggatattgtggattagtaaaaatcccaatatagttctgcaatgtgaatttttccggccagaaggtcgaaacgaatccagtatcattgaatgaaaaacttgctaagacgatccagacaatcggtaaaatccaaagaatcgctaaaacaattaataagatataccgaaagattaatgagagccgtctttgatttgaatatgacttcatgtctagccctccttaaatgcattagtacgacgatatgcaatcaacgaaacggttgcactaataataaagatcaagatacccaatacggcactggcgttataacgctgttcctgaccgaaggtcaagttatataaccacgttaccaacaagtcggtcgatccggcgccgttatacttactgttcatcggtgcaccacccgtcagtaagaagataacgttgaagttgttgatgttaccaataaattgttggataagtgaaggtgccattacaaatagaatttgtgggaaagtgattgaacggaaaatttgtgcggcattggcaccgtcaatcttagcagcttcaatttgatcttgtggcaagttttgaataatcgctgttgaaaccaacatagaaactggaataccgatccacatgttaacaagaataacggtaattcttgcaactaaaggtgaagcttggttatcaataaagtgaattggtgaactaatccaatgcaagttcatcaagatattgttcaaagcaccttggtagtccaagaactgcgccatcatcaaaagtgaaacgaattgtggtacagcccaaatgataacaaagattgttctccagaatcccttgtgcttgattccttttgattcaatcagaagagcgagcaaaacaccaaagaagaaagtcgtagcagtagctgccacagcccagatcaaagtccagcctaagactgggaagaaagtaccagctaagtcaccactcaaaacatttccaaatgcttggaaacctgtccacgagaaagcgattgggtgttgacgatcatagttggtaaaggccattgaaatcatgaagatcgttggcaaaatcgtaaagaacaagatacccaataatggaataaccatcaaggttgcgtgtaaccgagtatcaagcaaactcttaagttcttcaacgttagttggaatatggtccccatcacgcttcaaaatataattatgtctagttgagcgtaagttgacaatgtataggtaaatgattgctacacataagatcaaggccaatacaccgaataacaaaatcaaaactgagtttgatggttgcttggttacataaacgccttgtgcggcatcataaacaacttttttggttttaatagtacctaatgtagctaatgaatttaaagtagggataccactgaggataaaccaaacaataaagataatttctgaaagtaagagtgaaataccttttacccattgtttgtttgccaaggcgttactacccattaagaagaatgataacttggtagcaatgtcaccttttgaccaaacctcgcgatatgttgctttaggagctacatgctttttctttagaaacataacttctccccttcttaggcaaaaaggctggacaatttttatttagcccaacccttgcttatgcttttagcaaattatttcttttcaatgttcttagcgagcttagcaagttgtggcttgtattgtgctggcttaatcttgccgtcgtaagtaccactgataagtggagctgcaccattccagaatgcggccatttgtggaagcttaggttgcaatactgagttacctggcttagccatttcgattacagcttcagcaaccgggtcactcttaacagcacttgagttgacagcgctcttcaatactggaatttgaccagcgttcttatgagcaattaattgtgacttcttgttagtaatgtaagcagctaaatctgaagcagccttagcattcttggtgttagcattaactgcgaagccttcaataccaaggaatgcttccatttgtacgctcttaccaccaacttcaatcttaggatacttagcaactgcgaagttcttacccaagatcttcttgatattagcagcgttccaaggaccgtccaaaatagcttgtgcgttacccttcttcaattggttcaaagcgtttgaagtttgcattacacccttgttcttcttttgagctgcgtaccacttcaaagcattaacaccgttttgtgagttgaaagttgagcccttaaggtcttcaccattcttaccgtaaagtgtagtacctgctgagaacattactggccacattacgtaagcgttagtaaagtcggtagctacaacaccctttgaagttaaagtcttccagtccttaacgtcgttagctgataacttagacttgttgtagtaaatggtttgagcttgttgtgcgtatgggaatgcgtaaaccttgcccttccaagttacaccctttgaagcaacatcgacatagttgtcttggatatccttagttgctgatggtgaaagtgggttaatgtaaccagcttcagccatttgacctaattgatcgttaggaacttcaaagacatcagcagcctttgatgggtccttaccaacgtctgtcttagcgttagctgaaccgttaggactttgaactacacgaaccttaatattcttgttcttcttagtaaagtccttagcaatttgcttgtagtaaggaacttgttcagtatccacccaaagagtcaagttagccttcttgtttgaattactgctacttgatgatgaattacttgagccgtttgaacatgctgctaatgataatgcagcaagaacagcagtactacctaaagccattttcttccaaatcttcatgactttttcctcctaaaaaatcaaaacaataaacaattcttaacaacagtagcttctgctacatatggttgtaagcttaattaatcaaatttgtactgcgttttcagtacaagagttagttcacaattgccttggtagaatccttgtcaaagaagtgagctttgttaacatcaaagcccatcttgaccttgtcacctggcttgtgataatcacgtgaatttacaatagcagtaaattcagtaccatcaacttcttggtgaatctgaatagttgcacccaaaagttctgaaacaacaacatttgattcaattactgaatctggccaggtttccataaatgcttcttctgagtgaatgtcttctggacgaataccaaagactaagtctttgtcgttgtagcctttttcttccagcagttttgccttaccttcaggaataccaatattcaagcctttgccatcagaaattcgaccgtccttgtagtgaacattgaagaaattcatttgtggggaaccaataaatccggcaacgaacatattaactggcttgttgtaaacttcaagtggtgagccgatttgttcaactctaccaacagacattacaacaactctatcagccaaagtcatcgcttcagtctgatcgtgggtaacataaatagttgtagtacccaagtcttggtgaagtttagcaatttcagtacgcattaccacacgcaatttagcatccaagtttgataaaggttcatccatcaagaagataggtgccgcacgaacgattgcccgtcctaatgcaacacgctgtctttgaccaccggacaaagcacctggcttcttatccaagtactcttcaaggcctaacatcttagctgcttttttaaccttttgatcaatttcatctttaggcgtgtgacgcaactttaaaccgaaggccatgttgtcataaatggtcatgtgtggatacaaagcgtagttctggaaaaccatcgcaatgtgtctatcctttggagcaacatcattcattaccttatgatcgatttccaaagtacccttactgatgtcttccaaaccagcaaccattctcaatgtagttgacttaccacagccagatggaccaacgaaaacgatgaattccttatccttgatatgtaagtcaaagtcgttaacagaatatctgtcgttacctgcatattttttgtaaatatggtttaaatcaacctcaaccattgtttcccctactctctttaattatttttcattaaaaactttttcaatttcactcaatttcaactcagcagttgttggaacgatgtaatcagcttctttcaaaagctccttatcaccaattcctacggcaaattgacctgcagccttgattgcttcgaccccagctttggcatcttcaaaactgattacttcatcagcctttaaccctgcaatttcttgcgctttgatgtaaatttcaggatctggcttaccatgatgaagtgttgctggatcaacaatgccatcaaattcatccataatacctaatctagttaaaatcttaggagcattcttagaagcagaagcaattaccatctttaagttttgcttcttagcatctgccaataactcagggatcccaggcaaaatgtcctttggcgtcattgtttctacttgttcaacaaatttagcgttcttttcagctgcgaacttttctttttctgcttcagtgtatttgtcttcttgaccaccgtacttcaagatcaggttaagtgaatccattcttgaaataccacgcaagctatcaagttgagcatctgttaaggtaatgcctaattccttagctaaattgttccaagctgtaaggtgaaacttagctgagttagttaaaacaccatctaaatcgaataacaatcctttaagcatttgtagtttcaccttctttaagagtaactttcttatcgtgaactaatacatcaatatcttcacccttaagcaaagtaagcttagttccttcatgatcaacataaacttcgatcaagcgaccacggtagttgatcttgaagctgtagtgatcccaaccttcaggaacaaatggattaaacttcaattggttgtgatcgtaacgcatgcctgcgaaaccttgaacaattgtaagccatgaaccactcattgaagtgatgtgcaaaccatcaacggtgtcgttgttgtagttatcaaggtcaagacgagcagttctttggtaaagctcaacagccttcttttgcttgccaagttcagcagctaagattgagtgaatacatggtgaaagtgaactttcgtgaactgttaatggttcgtagaagtcgaagttcttttccttttgttccatagtgtattcatcgttcaagaagtagataccttgtaaaacatcggcttgcttgatgaatggtgatctcaagatcttgtcccatgaccagtgttggttaattggacgttgatctttgatttcgctaactggacgaatatccttgtctaggaagtcatcttgttgtaagaagatgcctcgttccttgtcttctggtaagtacatgttatctacgatgtcttgccatttagccttttcttcgtcagttacgcgaactctttcttgagcttccttagtagcaagtggcaaacgttccaaagtgtatttgagaagccatcttgccatggtgttggtgaaccagttgttgtttacgttgttttcgtattcattaggacccgttacaccgtgcattacgtacttgttacgccactttgaccagtgaactctagctgcccagaatcttgcggtaccaactaaaacgtccataccttcgttcttaacgtagctgtcgtcgccagtgtaatcagtgtacatagcgattgcgtgaggaatgtccgcatttctgtgaatttcttcaaaggtgatttcccattcattgtgacattcaatcccgttgaaggtaaccattgggaacaatgcacctggtaagccttgttctttagcgttatggtatgcgcctggcaattgatcgtgacggtattgtaaaagtgcccgagtaacactaggatcagtaacacataagtacattggaacaatgtaggcttcagtatcccagtaagtagcaccaccgtatttttcaccggtaaaacctttaggaccaacgttaagacgttcatcttcaccgtaataagtcatgaataattgacaaatgttaaagcggataccttgttgagcggcatcatcaccagcaattacaacatctgatttgtcccagcgcttttgccaaacggcttcatgatcagctaagttttcttcaaaactcttagcttgaagcttggtcatcaattcagctgccttagcatcttgatcatctggtttgacgtcacgactagtaacaacaatgacatctttttcaagatcgtagctttcgccttcatttaactcaactgaaagcttttcatgaagttgggctgcttcagttgaaacatcacccttaactacttcaccattatgacgaagactttgcttaaggaggactgtaaattgtggaaccttgtatgggttagccttagtttcaaccttaatagttcttgcttcagcattttcacctaaaggcatccagaattttgcatcgtagttactgtcttcgttaacaacagttccatcaagtgctgcatcaaagtcgatcttagctttaccacttaaaacggtagccttaactttaattaaagctgcttcttttaaggtaatatgtaaaaacctttcgaattcgaatttaaccttagtatccttaccttcataagtaaaacttctagtcagaagaccttggtgcatatcaagtgctaagtagaaatcactaaacttaactttagctaagtcaagtttttcaccattaatcgtaattcccatgttgatgaaacttggtgagttaggaaccttaccaaagtactttggatatccgttcttccaccaaccaacacgcgtcttatcagggaaccaaacaccagcaaggtaagtaccttgtaagctgtcacctgaatagccttcttcaaagtttcctctcatacccatgtaatcgttgccgattgcagtcatactttcttgcaatcttttatcttttggttcgaacttatgggtaacgaccttccaaagatcaatttcaaaaattcgtttcatatattctatctcccgtaatattcgaggttctctcttgtttacgctttcattatcctttagttgaaagcggtttacaatattaaatctgctgttaccgttatcaggattagttaatagaaaaagaaggtagatcttaatctgccttctttttttgcttattaaaagtaacttttaatgaacactcactacaaagccttttggtgccaattgattattctcataatcttgactaaacgtgttctcacaattgatctctactggatgatcggtcgtgttaaagtatgctttaatgctttcattcccctcacgatcgacctcaattaacccattctctgttacgtgtaacttaattcgacctttaccgaaagtttcatcatgttgcaaacgaaagtcaatcaattgatgaactcgttgccaaaccggaccgtcttcttttgcccaatccattggtttacgacaatcaggatcgttgccaccagtcatacccatttcagttccataataaatgcatggactacccttttgcataaattcaaaagctaaggcttgcaaagccaaatcttggtctccattagctactgtcaaaattcgggctgtatcgtgtgaatcaagcatgttcatcatggctgcattggtagcatcgcgatatttcatcaactggtctgtcaaacgactagttaattcttgtgctgacagcttatgcttgaaaaagtgatcttcaatctgcaatgtatatggataattcattacgccagtaaactcatcaccgttaagccatggacgagctgagtgccaaacttcacctacaatataaaagtctgacttgatatcagtaacagccttgtggaatttcttccagaagtggtgatcaacttcgttagccacatctagccgccaagcatcaatatcaaagtattttacccagtaagtagcaatctctaacaagaaatcctgtacttctggattagctgtattcaactttggcatatgcttttcaaaggcaaaagtatcgaacttaggactaccctcaccctttaatggatcgcggtaaggttcaactggatattcattaatgtggaaccaactagcaaaacgagaacttggaccatttttaacaacatcttgccattgcattgattgatcacccaggtggttgaaaaccgcgtccagcatgaccttcattccgcgggcatgagcttcattaacaactttcgcaaataaatccttgtcgccgaatgccggatcaacttgcaaatagtcaatcgtatcatatttatggttagaactggctttaaaaataggacagaaataaaggccattaacacccagtttcttcaagtaatctagatggtcaagcacgccttgcaggtcaccaccatagaagtcttcgcggccaggatgatcctccggattccacgctttaaccccttggggatcattagacttatcaccgtttgcaaaacgttctggaaagatttggtaccaaacagtatgcttaacccattctggcgttttcaccatatcaatttcatggcaatatggcactttgaaataagaaccatcttccataatggccttgtctacatcactgctaattgcacgatcaccgacaactacactagtgccatcactgccaattacttcaaaggtatacttcaagcgatgatatggtgcttcaagcgtaatgccccaatgatcttcacactgccctacgccaattttttccatctcacatgttttagcctgttcaagtggcaaataattatcgcagtaatgaacaattacttttttaacgtcatttttagcactgtgaaaacgcacgcgaacatgacttggatcaactacaaaactatcttcactttcagttcggtgtcttaaagctgctaattgcatatattaattctcctttttcaacacaacacctgcataaggcatcaaagttaatttttcattagttaattgatattctcccgcttttagtgttgcaacagtataaccggctggtatttcaacagttgtcttttgatcactcaatgaaacagctacaatggcactttcatcatgtaaatcacgttgataaacatagctattcttatccgttgaaatcatataatacgttccaatctggaataaggcttcttttttgagttccagcagttctttgtaaaaattaaacatgctggtggtatcgttaatctcattagctacgcaagcatcatcctgtttaatacctgttatccatggtttaacttcactaaaaccatggttctcagttgcatcccacggcattggaccacgggccggcaatttatgtgtttcactaaccatagctaaggccgcatctttgctcaaaactttttctgcatcctttaaccatggcgctacagtttgatcttcgaattgatctgcactagtgaaatgtagattctttaaccctaattcttcaccgtaataaattactggaattccgcgttgcaaatacatcaacatcgccaagctcttagcctgagtctgtgttctagctacgcgtgtagccaaacgggccatatcatgattattccaataaagagtaggctgcgatacgcctgctaatgtttgttgccaaaccacttgattttgtttaaaggccgtcaagtctaactttttaggctgatattgctttgaaaaacgctgatcacaattagaatcatcatcggtaaagtaccggaaggtaattacactatccattaggtgattacgcttagtcgtgtaatcaacagctagattgacactagcacttgcagcttcacctaataaaagcgtatctggataatcctgcttaatctgctcacagaaaggccgcatccattcctgcacctgtggtaagttagcgaaaaatggttccgcaacaattggcttgttcacgtccccatctccagttggataattttgtcgcaaatctgccttgccaatatggataaaagcgtctaaacgcaaaccatcaattccttttttcagccaatactctgccacttccaacatagcatgccgaacttcgggatttttccaattcaaatcaggcatccgtttatcaaacaagtgaaagtaagattgacctgtgcctgctggatctggctcccatacactgccaccaaagaatgaaccccagttattaggtcgcttgccatcatgaccagcgaaaatatagtagtctcgataaaggctatcggggttcttgatggcatcttggaaccaaggatgttgatcagatgtatgattcaagacaaagtccatgatgaggtggatccctgccttatgcaaatccttgattaagttttccatatcttccatggtccccatatgaggatcgattgcgaagtagtttgaaacatcatagccgttgtctacttgtggtgaaacaaacacaggattaagccagacggcgttaactcctaaatttttcaaataagggatgcgtttgcgaataccattaaggtcaccaacgccatcgccattgctatcttgaaaagacttaggataaatttgatatataattgcgtgatcgtaccaatgtgccataattaatttcctccacgcatagtttaagggaaattagaaaccgttttcaacatcatatttattgttagcggtatcaaaaaagcacaactcaaatttgaattgtgctctttgcttacttctttttaaatatcatgttccaaaccacttgctgcctttctcctgcaaatcagccactggctgcgttacctcaatacagccaagatattttccttgatcattatgcaaactataaaaggcaatgttcaccggaatcccatctttatgaatcataatcgacaatttaccacgtttgccttcgtgcatctgctttaaaactgccttaacatgaccttgactgtgaccgggatgaacttcaaagacagttttgccgatatctttttcagttcgcttaaataagcgatgtttattcatcgatgaccaaacaaccacatcgttttcatctaggacatccatttcctgaggaatagtctcaaagatagcatttaactgttcgacacttaaactgccgcctattaattcgattttatctgtcatttactttgctaaccttataacttcacgggcaatcatcaattcttcgttggttggtacaatcaatgcttttacttttgaatcaggcttagaaataaatttttcaccgtctgttcgattagccttatagtctggctctaagccaaggtagtggagtgccgacattacacctgcacgaacacctggatcatgttcaccaatacctgctgtaaatacaatgccatcaataccatccatctctgctgcatatgcaccaacataacgtacgacacgatttacgaaaatctttcttgctaatctagcatgctttttcttacttgccaacagatcacgcatatcagaggaaacacctgatacgccaagcatccctgacttatgatttaacatgtctactgcttcttctactgtcatactggtcttttgcataatatactcaagagcagatgggtcaaaatcaccactacgtgttcccattgctaccccagttaatggactaaagcccattgaagtatcaagtgatttgccgtttttaaccgctgtaactgatgcaccagaacctaaatggcaaacaatcaacttaagcgtatataagtttcttcccattagtcgagcagtacgtggagctacgtagcttactgaaataccatgtgcaccatattttctgatcccatatttctcataatacttataaggaattggataaagataattaacctgatcaagactagtatgatatgaagtatcaaacactgctacttgtggcacatccgggataatcttcataaatgccttaattcccatggcttctggcacattatgcaatggtgctaattcacccaagtcaaaaatttgttgaagctttttttcatcaattaaggcagactccctaaaaactttgcccccattaactactctatgacctacgcctgctagttcatccagactttttaatacgtgaaacttctttaaattttcaattaataagctaacagccgcttcctggtctggaatcgaagtatttttaatatattctttgccattcaacttaattttgaaaacagcattgtccattcctacacgatcagccatccctgaagcgataaccttttcgtctgggaataaaaaaagcttatatttaaatgatgaactaccagaatttattgccaaaacttttttcataatcgtgacctctattcatattttatctcttatttttagtatagcgctttcacctataatagaaaataattttaaaagcagttaaaaagcacctctgagttatcagacgtgctcgttattttttcgatttatctagttgattggcgccgaattagcttaggtttgagcattacttcaccttgaggtgaacccgattgggcaatcttttgcagtagcattttagctaacatttcacccatttcaaaaattggttgtttaattgttgttagctttggattagaaacttgatctaaaaagacaccatcaaaaccaataactccaaagtctttcggaattcgagcgccttcatcttgcaattgccgtacaacacccactgcaattcgatcactggcacagacgaaacaagtatcttttttaaattccttaaaatgttcatgaatcacatcttgcgcagcatgactatgattagaaacccgaaaaatttgtggtatcaactggtgttgttgcaaagtgttgatataaccagcttcacgtgaatattcaaatggctcttttaaatcaattccaataaagacaatgtgcttatataaccggtctaaagcatattgagtagccatcttctctgctaactgattatcagaatcaacaaagtcatagccgcggtgattttcaccaaataaaacaaaaggcttatcgagtttatcaaataattcataatctttgtttcgcgccccggtaattaaatagccatctgcattttccttttcaatttgattaggatccgtaactaattgcatcgcatactgcttagtatttaaaccacgagcaaaaccaaaaagcaagttcatatagtatggctcagtggtatcaatatcttctaaagtgacgaattttaccacgttagtccgattattaactaaagcctgtgcaattgaattgggatggtagtttagtttctccattgctttttctaccattgctcttaattctggcgttacttgctcaggatgattaatcactcgtgataccgtcatttttgatacatttgcttctttagcaacatctgataaagtagtcatattattcctattctaagtacatctttctgaatcggtttaaatctttttggctaaagccaagctcttttttgaaaaatccatcaaaactgccccagccttggcgaatagtttccgtaattccacgaatagccggtccctctcccttggtaatattcattttagaaactaggctagcaatttcattatcatcggggaactgtttagccaaagcaaagtcatacaattcattggtcaataaataatcacgcgaaatggtgtcatcatcaacacctaatgcagttaagatcagtgctgaagtcattccagttctatctttgcctgcactacaatgataaactagcgcatcttcttcaggtaattcaatcaattccgcaaaaattttagcaaattcatgttgactatgtgaattaagcaaaacctgctggtaaatttgaccaagccaattgtcacccatatcaggaatatgatggacaaagcgatataacttgttatcgcctttattttgcttgcggttttcagaataaatatgtgcatcaacaaaacggacatttgaccaaagcttgtcaggcgctgaattttgttcatacttagagcgtaaatcaacatctacggtaattcggcgttcaactaacttttcttgatcttccttcgacaaggagctaagtgaatcagaacgatatattttgttccactttacatgttgacccttgtcattttggtagccgccgatgtctctgaaattcagcggtccatccaaagctaatattcgatcatgcttcatttttccttgcctttcctcattaaagtgttaataccgtacttttattatatcattatcagtcatgtgcaaataaccgagcagcacgaattgcacgttgccaacctgaataaagtttttcacgttcaactgcactcattttcggctcaaaggcctgtccaatcgtaaaggtatgctttaactcgtcaatatttttccaatagccaacggcaaggccagctaaaaaggctgcacccatgctggttgtttccagcgttttagcgcgttcaatttcaatccctaaaatgtcagcctgaaactgcatcaggtaattgttgttgctagcaccgccatcaacacgtaaagcaggaatttcaatgcctgaatcttgttgcatcgtatcaacaacgtcacgggtttgataagctaatgactgcaaagttgctttaattatatccttgtcagtagttccacgtgtaacaccgaagattgaaccacgagtctccgcatcccaatatggtgcgcctaacccagtgaaggcagggacaacgtaaacctcgttctctgatgtcgactcaagcgctgcttgttcagagtctggcgcatgcttaatcaacttcatcgaatcgcgtagccattgaattgcactaccagccacaaagattgatccttctaaagcataagtaatcttaccattaatgccataaccaatggtcgttaacagattattgttagagtctgttggcttgtcccctgtgttcatcacaataaaggcaccggtgccatatgtatttttcaccattcctggtttcaaagctagttgaccaaataaggctgcctgttgatcaccggccatcccagcaattggcacttgtccaccaaagaacatatatgacgctgtttcaccataaatctctgaattcgagcgcacctcaggcaacattttcttaggaatattgagcaaatgcaaaatatcgtcatcccacttgagcgtgtgaatattaaacagcatggtccgtgaagcattagtgtaatcagtcacgtgtttagcaccatcagttaacttccaaactagccaactatcaatcgtgccaaaaagcaactttccctgttcagctttttcttgcgcgccaggtacatgatcaagaatccagcgaatcttagttgcactgaagtatgggtcaataattaagcctgttttttgacgaatttcatcactgtagccttctttttttaatttttcagctaattctgttgtctgccgtgactgccaaacgattgcatgataaattggctcacctgtatccttgtcccaaacaacggtcgtttcacgttggttggtaatgccaattgcggcaatttgattaggccaaatgcccgaattaataaaagcattggcaattgttgtttggaccgccatccagattttattagcgtcatgttcaacccagccaggctctgggaaatattggtgaaattctttttgggcagaagcaacttcacgtccatcatggtcaaaaataattgctctagtagaggtggttccttcatcgattgctaaaatatatttttctgtcatagttattctcttttctgcaaaagcgctttcttataatattactgtttttctaatgcagattctagcagttaatgtaatagatacggtataatttttataaggattttttaaggagggcattttaatggaaaaaaatcaaaaaattgcggtaacaattgcgggtaacgatagtgatggtagtgcaggaatgccagcagatttgcattcattctatgcacggggcgtttatggcatggggctgatgaccgcggctgtagctggtaatacaaaaggaatttttgcccaacaaattatgccgcttgattttatccaaaagcaattcgatgtgttaaacgacgacttcaagattaatgcgactaagacagggatgctggctaacaaggaaattatcgattgcgttgccgataatcttgaaaaatacgacatgggtaaaatcgtgcttgatcccgtcatcatcactaagcacggtgccaccctacttgatgatgatgcctaccagaccttcttagacagattattgccgctagccgatgtaattacgcctaacttttatgaacaacaaaagctaactggcttgaagctaaataataaggaagaaattcacgcaggcgctaaaaaactacaagagatgggtgctaaaaatgtcttgatgaagggacgtcatgactcagataatcagactgaagtaactgatattttgttgactgaagatggcgcatttcacgaatttaccaagcctttctttaagactgatcgcgtgaatggcacaggtgatactctctccgcagttattgcggcagaattagctaagggaaagtctgtaattgatgctataaaaattggtaaggactttacttacgctgcaatttctcacccaattgatgttggttcaaaatggggtccgatcaatcacttggctgcacaggaagaaaatagatagaaaaaacaccgaagctcagattttgagcttcggtgtttttatgtctgttttcaattaaatcattgctgtgtagagatacagtattacacaaataatgaacgctattacgtatcccatgattatgctaataactcaatgaatatgatgatgttgcatccaagtagctaaccagtcgcccaggactagacaatatgatcctactaaccagtaattgatctttttctgattaattgctggtaatggcaagattaagattattattagcgctacagctaaaatatatttcaaggctgtatagagtttaggacttagtaatgattcacgcaatttattttaccttgtttcttctaaatcatatattcgatttccattaatttttggatttacttatttcttatagctcttaatgatccaaaatataccaagcataataaaaaggatcgataatactactagttgcataactggtttatatctaagaacgcatgaatctattagaaataccacaccaacagcaataattgtcattccagatattttgctttccttttttataataattacttaaacttcccacatcaaataagctggcaattctttgatattgcttagctttgggcttctatactatttttgctagttttctttaacaatttttgcatgtatttgggtaaacgattgataaagtcagccgtgaattctgctatttgtgcttcactggcatgaaagactttttcaacgctagccaccattgcttttgtgattagctgaagtgaatgactgaatgtaatatccgccagctcatcaatcatgcaatagaaaagctcacctaaggttcgctcatcttcgtcgtcccgcttggctactgacatgagcatatagcgggtaaagactatagccacatgagcagtcaaggcatcgtaggacagaccatgatattccgtgcttagttttaggtagcttttgcaggttttgaaaaaaacttcaatatcccagcgtttgccataattgcgaatgacttcatcttcgctaagcgacatgtcggtacaaataatagccagccactctttacgattggcacggtttctaacgcaaattatccgagcgtcaattttagcaccgtctttgtcttggcggccaaccttgactggaattgacaacagatagcgcgaacgcccgcgtcgctttttacagctacgataaatctgtttgatgtttttgcgttctccttcaaattcatatttgattttggagctaactttaaccatggcaattacatccagcttcctttgcttgagctggacgatttgatgtggatttgagaaccagctgtcaaacagcacgtacttggcttgatgacctgctttcatagcttggtcgattaaattaaccatcacgtctgtgcctttagtccgggcaagcatgcgtcttttgccagcaatggtgcgctgatcacagactttgttttcgccaatcatattctgtagcttgtgagaggacagcaacaccgaattgattggcatgaaagaagctccatcagtccagcccagggtcatcatgcgaaaacctttcttgtaagtcattgatacatggtcaaaaactttggcgactaattctgttttcttgaagccggtcctagagaagtaggaatcatcgacaacaaagcaatcagcccgtttttctgaagtcaaagatcgcaagtgattattaatgatttgcgcagaaagcagtgtggtgaagtggagccaattgacgtggacgttgcgcataaatcggtaataagaatttttagaaaagctttctttaaaatgatccgttttcagctgcatatataagctgcggtcacgaaagacattgcttaaaacgtaaagaaacaagctgaacaggctaatgcctttttccttgcggaagccacattttctcaacagcttgatcacctgaaacttcttgatgaagctgatgattgagtttgaaaatagttgttcatttttttggtcaggagatggtaaaatagacattggcacaagcctttcatgcatagaattatcgtttggtcactttaattatagcaatgaaaaggtcatgtgccttttatatttgttaaaaaacgcagaatcacaataaaaggagcgattctgcgtgtgggaagtttaagtaattattacaacagcaattaagattactactgcagttacaattgaagcaacgtcgacttgcattaacttaagtttttccttccatctaagtcttcaactattattttaaatcatgtaagttctcctgcgattgactttgtatcatatttgttacaaattattactcagaccaactagcaataaagtttttatagcctaatacaccaagatcctgtctaatctcttttgttttgtccttttgatccaaaaataatgctttcatataaaacacttcaattctataaatcatcaaatggagactgtaaaatagtttgtgtaaggatgaatgattccttaaatttatttctttaaacattagaaaaaggagttcctttctcgtatgattggtttgaacaaaaaaacacatacagaaagaagaactccttcatgaatgattttaccaaagattttgctcaagctctattcaatccagacaaaataaatgatttattgcgcaaagagctacaacaggctgttaataacttgctagaagctgaattgactgcctttctgggctatgatccctatgccagaaatggctggaatactggcaactctagaaatggtgcttatttccgcaaagttgatacgcaatttggcccaattgaagtgcaagtgcctcgggatcgcaacggtcaatttcatcagcacacgctgcctggctacaagcagcactcggatatcttggaaagcatgattatcaagctttactccaagggcgtgaccaccagggaaatagccgatctaattgaaaagatgtatggcagccattacagtccagctcaggtatcaaatatttccaagcagatgattccaaaggttgaggcttaccacaaacgcaagctaagcgacaagtttttctgcgtctatttggatgcgacataccttcctttgcgccgagaaacatttgagcgtgaagcagtctatattgccattggcatcaagcctaatgggcacaaggaggtcattgactactgcattgcacctagcgagaacattgaagtctggacagatatgcttcaaaacatgaaatcccgaggcttaaagcaagttgagctttttctttctgatggtgttgttggcatgaaaacagccttggccaggacttatcctaaagctcattttcaacgctgtttggttcatgtcatgcgcaatatctgcgctaaagtacgcgtcgacgatcgtgaaaagatcatgaatgaattcaagcaaatccatcaacagccaaataaagaagctgcgatcaaagtcttgcacgccttctatgacaagtggaacagagcgtacaaccatgtcatcagagatctcaaagagattgagcctgatctgctggtcttttacagctatcctaagcagatcagggcttcaatttactccaccaatatgatcgaatcctttaacaacgttatcaagcgtaaagctaaacctaaagcagagtttccaaatgaacagtcgcttgatacttttattggcattcaagcaatgagctacaacgaacgctatttcaatcgaatccacaaaggcttcggtcaggttcaggataccttagaatcctactttgattaaataaaagattaaaaaatcaatctacgagaaaaatctatttacacaaaagatttgacagtttcatcaaatgaaacgacccagtagcattaataatatattccatcacatcatcaatatgatcaaaatgtgtcagttgtttatgaacctttctgtcgtaacaaaccaccagataattttctagcaatcttaaatatctttcagtcgttaactctgaaagctcagatttgtttgcaaaatcaagcaagcgcccaattaaaaagtccaattcatcttgtggccacatcggcatcgtattaaccagtaatctcaacaggtctggtcgctcaagccaattatttccttcatcaaactcagcttttattttcttcctgatttctacatcaatcttgtcagtcttccccttaaaatatgtcaaagtaattagtgctcgcaactttagaatctcattattagatgaattcattatctgctgacaatacttatccaaagcttcagtatctttcgcactaactgcttgattcattttagtttcaaattgcttctcaacttttcgttcttctaacgtgtagtcatcttgaataagatcacaaaattctactaaatcaatttgatgctcaagcaatatttgaaataagctttctgcatttatgcgatttttatcgctttcaacttttgcataaaacggtcgactaagaatcccttcgcacatctgctcttgtgttaaccccaacttcaatctttttttacgcagtgcttctccaattttcatagcaagcctcctgtacaatttttaataaaaatagcactttatactttttagtcaatgaaaaaagccgccccgagggacggctttgtagtggcgtagcatgctacgaatcaacgtaggagttggtcaagcatatgctttaatcgcttcttaagagctttcttaaagcgcttgatgcttccgcggtcaattggtataactactagtacgagaaagatacaccacttcacggagaatacacctccttctgcacgtaaagtaaaggcgctaccctctaagtgtataattttttacggtaagttgaataaataattaaaaaagcccaagtcctttgaatttggacttgagctcaaacaaaaagaccagtagtctgatgttaagaacaaaaaacacattagaagctggtcttttatgaattcaattgtaactgaaatcgcaaatattataaagtctgaagataattatattaagcgtgaaagaaaaataatctgtttcttcttaaacctgattaaggaaatcatggccttggctttagctaaagttgatgatgaaatgattaccaaggttaaagcacagggctatcagattgataagaagaatgagcgctcaatcaatatggcttttggcgaagttaggtatgtcagaagaagatatgtctgcccaggcaaacaagcaaggtatcccttggatgaattaatgggctttgacaaatacaagcgctacagtattttagcagtcaaaaacatcttagaagtaagcagcgttgccacttatcgcaatactgctctagcagtcaattgcctgtctggctttaatattagccatatgcaggtgggcaatttggtaaaaatggccgggaaaaatattaaagcgggccaagaagcagattcaagatatgatgccgcaggcactaagaaaaaggtcccagttttgtatcttgaaggcgatggcgtggtgatcaaaggcactaaaagccggttggaatttcatcgctatcaggtctgtgaaggcattgtcaatataagcaagaaacgcagaaagcgaatcaatgccaaggaatttgtttctttaagccgacttgatgcgctgaacgaagccaaggagtacctggccaatacttatgatctttctgatactgtaattcttagcaacgccgatggcggtgctggatatgccaaaacagacttcgatgacattgtagggctatgcaagcgtcatgagcatttcttggatgtctttcacctaaataagaaaatcaaagaaaggctatattttgcgcctgacctgcaaggcaagctgatttctgctttggaatacaaatacagctatgacaaagttaaaactatcctaaccactgcagaaagccgactaattgatgaattgaataccgagctcaatcatgattatctggggcgcctaaggaattatattgatcgtcattgggacgatattaagccgtttaagaaacgaaaactgactgtgactaaagccattggctgctgcgagagcaaccaccgcaagtatacctaccgtgttaaggggcaaggcaagaaatggtcaaaatctggagcagaaggcatgcttaggatcttaagctgcatcaagaatcgagagctggaattttggcttagcagcgagtttgaagattcagaaataactgtattgactgaacaggaattaaaagcagcggcccgtgacagcttaaagaagcgtcatgaagttcatttaggcatccagcatggcgcattaaccgcacaggtagctggcaatagttatttaagcaagctaagcagaaatttaagtcatataaatatttaagaaattaaggttagactaatggtttaaaggctaccgcaaaaacattgacacttaccgctaccctttgtgacgtgcattttaattttatcatgatataatacagttagtacgagaaagtatgcacgtgatgtgcgtgggctactagctggtagctcaaaaattagcagggcggtcgaatgaccgtcttttttgtgcaaaaaaacagcaacgaaattaatcattgctgctaatttacttacttctttttctcaatcacaaaataatatcctgctgtcaaaatttgagcaattccttcaagcgtaattgccaaatctgcaccaaaacgcgctacaatcagcccgcctaaaaacgagccaattggaagcattgatgacagaatagagtcattaattgtttctacttgacctaaacatacctatcttttttagtatatggttctatctataaatataactaccatcgggataaaacgttattgctcgcttatccttgtaggactcaattaatgcattgattgaatttttatctttgaatcccattctttttgctaaataattttgcgtcctgcctgtatccttacaaagggaatttaatgttctctttagatacttaaaatcatacttcttatttaaagaatacattaaatctaaaagagatattattacaattgctaatctgtgaggataattaccattatccatattcaaatatttgcgatattttgtagcgactttaggcatggtcttcaacgaaatatctaccaaatctccattatgacaacatatatttctaattaaatttagcaattctaaactttgaattagacttttaatatctaaatggaataatttctgactaatttctttacggttatcaggtagcatcaacttggctaaatatatactttgcccgaatgataaagtatttaccataagccaaactgtgggaaatattcttgtacggtccgttcgttcaaatttttgaacatctatatagttagactttttcacttgatgctgcaattgtgataaaaaagccagttcttcattttttatcttatacttatctatttttacgcccataattcttccacgacgtttaacagtacctaaatatttatttcttccactattttgacaccacttttcaaagtccaaatataaatatgggtctgtcttacctaaaatataagagatttcattgttcaatgcagtttctatatcaccaattgcttgaaaaatttcttgctttaaacgttgatctctatagtatcttttaaccaattcatcaaagctaatacccatatactgattattatcatgatcccaaaatgcataagaatactgtttcaatttataatatcctattatttttaacgtattaacctgcttttcgaatttaatgctattttgatcaattccagtgattccttttttcttaaaaagaaggacttggtctacatatgaaagatgatgctccatgattttctccataaaaaaaccttcgctgatggataaatccgtcatcacgaaggtatgatctatcattattatacaagatttcccaaaaaaatgtagtatttagctagtatttttatcgaacgtatgattaattatatagttatttacatttcaaagcaaacagtagataaagtaagaaaaaaacagttacatgccataatgtaaacttagagatttttagcaatctacatctatgcataatttttgcatgaaaacagcaatgatgagtgtattttaatttacttctttttcccaattacaaaataatatcctgctgtcaaaatctgcgcaattccttcaagtgcaatcgcccaatccgcaccaaaatgcgctacaatcagtccacctaaaaatgaaccaatcggaatcattgacgataaaatcgactcattaatcgtttctactctacctaaaatatgcggactaaaactctcctgcaccaacacttcaaagttaatattcatcatcacaatccatagttcagacgtaaaaaacaaaatcaacagtagaaacggcatccctttgggaacagctggctcaagaacaattgctaaacctgataacgtgagacaaatgacgactagccttttaatcttgcttttatcaaaagttagtcgctgtaccagtacactgccaactaacccacctattgaagaagctaattctaaaccgccatagctaatcgctgatttagtcaaatgctcagtcgcaaaatatggcaagcccacagaggaaataccataaaatagattagtcactgcaaaaggcatgatcaagcgtgctattttgccttcttgtttcagagtttgccagcctttaagcaaatcttgccaatagttttctgtgaaatattcattcgacttattcgaaagtaataatttcctagacaatattagtcgcgtataaaaagctagggcgcttgcaaaaaatactgcagaaataattatcgtggaatcaagtgacacccaagtaatcaataacgttgccgctgcattcaaaaacaaatccagcgttttataagtcatttggaaaacgccgtttactttagttagctttgcttttgaaataatgactggcaaaattttttcttcagcaggataaatcaaagttgagccaatcgttgaaatgacgtatatccctagcaaaagccaaattgttaaatcttgccacagtttaatttgaaacaacaacgccgctataacgctgtccactatctgcactagcgttacaagcttaagtagctttttaatatagacacgatcaatcaacggtccgaagacgaacgacaacatttcaattgatgagtctgcaacaaagattaacgataagataagcggcgaatgaaagcgcaccttgaaaaaccacaagatcgccatgtaaaacaacgaatccgcaatgttggttaacactcgtcctgctaataatcgtctgacattgacattttctttttcaattaagttaaacattttcccattccttttcacaacactactaatgtcgctgaaagccagggaaaattactatttagttttagtttaaaatcccagactttcagctaaaaatctgggttgagccttaagtagcgtttgacgaatgaaaggaaataattcattcgcaaacttaaccctaaaatgtcgcgcattttagtcctcgctttctgtggaaattaagatcattatagcatgaacagtggcttatcaataatagtcattctatccttatatttttcgtattttcattcaatttcagatcatgacttatgataataaccaaattaacttgcgctatttcctgcaatagttttaataaatcactttgtaactcaggatagatatttgccaacggttcatctagtaaaaaacattgcgcgccagtttttaaaacagcagaatataactttactaactgtatttcacctgttgatagttcgctcatctctctatctaaaatcttttcaattctaaattgtggcgaatcaaaaacttttgcaaaatactcgcttttataaacctgacttttatcagaatatgatcctaaatagtccctcactgaacaattagggagtggtatatcttgaaataaacaacttatgttcgattctctcagttttcttttattaattaaatcagcatctataccatttatggttatttttccttcctttttcggcgtgtataggccaattattgtcctaagcaaagtagattttccaattccatttctgcccctcacaatataaaatcctggagtaacaaaattggcagaaaaattttgggtaaataacggtgttttttcatctaagtaaatattaaaatcatgtacttgaatcaagtttattttagagattatttttctaccatcttgttcattcttcatggttagtatattgttgattctcatccacgctactttaaatgattcaaatttaaataaaatagaaaaaatttcatcaacctgtcacaaaagttgattaaaatattgaaaaataattgaaaaggaaccgattgtcatcttactggaaatcactgataaaccgccattaataaacaatactaattgaaaaataagttgtaaaacaatctcgctattagacatatttaaattgagaagaaaatctctcttagcaacgcctaaaagcgttcttttagtattgctccatctctcagtttctattttctctcttcggttaccttttacttcaatatacctgcttaaccattcagtaaaaccagaaaagtacttattataaacttctttcaattttaaactaacttcaaaaatcttaggccgtaaaaataaatatatgagactatatgcaggcaacaggatcgctattaacaataaaaaaccagacccagccataaataaatatgtaaaaatcaaaattgaagaaagggcgattgaaataatttgatttattgtttggaataaaaaagtcaacacttcagtagtatcttcagtaattctatctgctgtttgaaccgaattcatctttgtaactgctagcgtatccttcacatacagttctttcattattacatcattaacttccatgtttatttctctaaatcttaaaatctgaattttgttcataaaatatgacaacaaaagtctgataagacttaaagccgttattaatacaatactacgtacaaaagcagccctatcagccttatacactaaggaatttaacagtattccttctaagtaaacattaaaagtcaaaatgccagtactgataatattcattcctaatagaagccaatattcaattttatactttttatcaattttgctaaaaatcgtatgcatagtgtcacctaactctgactagcagtcaaaaatattaaaatataatgaatataaaattagataaattttatattcttatttatcctatgtcaatactaaataaattgatttggttttactttcatgctgtattttatattatgtagttactaactaccaaataactatctatcaactacagaaagagaaaaatatgactgaaaaagcagcaattaacatccgtgttaataaagaaactaagcaaaacgcagagaaagtattaaacaaactaggcatcccgatgtcagtcgcaattgatatgtacttacgacaaattgcattgactgacggcattccctttgatctatcttccaagaaaagaaaaaagaaaaatgatcacgaaacagcaatgatggtcgcagaagctacagctcaatatgaaatcgttaaatccaactgggaggataaattagctgagtttattcctgactggatgaacatgaataagatgactaaagaggagcttgaagcaaggttagctaagcatgcccaagatgcaagagatggtaaaagtgtcgagattagcaaaacttttagcgacctgaataaagaattaggaatttaaatttcatacaagaatatactgtcaaatcaactcctaacgtatctgtagaacttaaagagatatatagctctatcttgcaattatctcgatctccaaaaactgctcgagattatgtaaaagatcttgaacaaactatgcaagcgttaaattattttccagaaagatatagaaaaactccttcaggaaaataccgacgagttaatttcaaaaaatatgctatattctactttatcgaaaacgatactgtacacattattgatgtcatactagcttcatcaagtacagtattcaaatattaatcctttgccccattctagctattaagctatactagacagaagaaattaaacaaactaagggacaataaaatgagcgataaattaattaaaattgcatacctctacgaagatttaatgaatacttacggtgactcaggcgatgttaaaatcttgagctttttgctaaagcgtgaaggctacgacactcaagtcgacaatatttcacttggcgatgacttcaatgcctttgactatgatttcgtcttctttggcggtggtcaagactttgaacaaactgttgtcgccaaagacttaccacgtcacaaagagacattggaaaaatatatcaacgatgacaagccaatgctttgcatctgcggtgggtatcaattaatgggtagttactataagaccaactcaggtgtaacaattcctggcttagacattttgccacttcacactgtcttcaagagcgacaagcgaatgattggtgatacccgttacatgaccgaatggggcgaagttaaggcttttgaaaaccactcaggtcaaacttacttcgacaacaaggacaagttgcatcccctcggcgacatgatcgaaggctacggcaacaacccacaagaccacgtcgaaggcctgcgctatcgcaactttattggttcatactcacatggtccactacttaaaaatactaatgtagctaatgccatcatgaaaatgattatcgcttggcaccaagaacgtgttagcgaagccgaaaaagtcacagaataaaaaagacccagtcagaatctctgactgggatttttcattatcaaattaatttaaaacacgtttagcagctgagggataaaagtaggcactgatagcctgctttctcaccccttgactaggagttgcagcgtgaacatattgtccatcaccaacataaataccaacatggtaaggagctgaggcagaaccccagaacaacaagtcgcctttcttaagatgacttaatgatacgcgtttacctttagtaacttgaccataagtagttcttggtaaggtctttttagcggcttttttataaacgtattgagctaagccagagcagtcaaaggctgaaggaccggtagcaccgtaaacgtaacttttgccaacttgttctttagcaagttggactaccgcgttacgtttttctgttttgctttgactagctgcttggatagtttgtgtttgaagtggaacattaatgaatgaaattcctgtaaaaaatactgacaaaactgtggcgaacttaactaaactacgtttaaaactcaatttatttccccttaacacttcttatctttcaacgttttctatattaccgtagaaatattacagccttgttttaaaatgactactataaaattaagcaatgtaacaaaatctgctatttcttgtaaattttgcttaacttgaaaaacactataattttctatatgcttaatacattaatttaggagttttttattatggataagatagatagttatgtacgccactttttaatattaatcgcgctaattttaggactttcactcgtttcagaactgcgcgaaattattgcctatgactcatctaccattggcattatctctttaactactgccattatctgcacttttgcctcaggtattacattgcaatttcacaagcttaactggcttacgatcagtctaatcttaattctttctgcaatcgtaattctattctggttcaaaacctatacttttggtctcgttgtcagcatttttctgatttataacatcattgtatttttggtttgtgttactaatctgatttttcaaaagaagattgaatagttagatcaaatgcttaaacacaggcaatgcaatcccaattaccactaacccaccattaaacaaaaaacttaataatttcttttcaaaaaaatattttttcataaaaaagacctctctattatgaataatcaaatcttcggaccaaaattccgacaattacgtaaacaacaacatataactctagccaaagcagcaactggtataacttcaagacagtctctaggcaactgggaaaacagcaaaggtgagttagattttgaaaaagttcttttgctactaaaaaaaatcaacgtccagccaatagactttttagagagtagtataagtagttacctcaaacaaactacttcacaaatctctgcagcttatgttaacaaccaagttgataaattattgcattatgctaataagtatcttgacataagccatcgtaatcttacagacagagttagctttttacgagctgctgtggcatgcaattattacatggacctaacgagtatagatctaacaactagttctgataaactacggatcatctcccattttaataaaatcttgaatggagaagaaatctggaattttgaggatatttattttttaggaaatacacaaaatctgatgagtccacgtgacatttatagtttagcctattctttaaattattatcgtcaaaagcacaaaaacgataatagagaatggatcaatgccgtttataacactttgataaacgctgaatttgtacttataaaaacaaatattaaattggctactgatttagacttacttttaagacaaaagtgggatttaccagataattatgctttcgaaaaaattcgacaaaattttatgcatgaactgctaaaatatatttcaacccaagatgaaagtgcaataactcagcaacttcacattcttgaattagaacacctatctgatttaaaaactggttttgaaacagcatatgaacaagtaaataaaatatattttcaataaactctcctcctagttagtaatattatcttatttctaatattgttagcgctttttgccaatattttagcatttttctttttacaaatattagccatgatattttatattcgtaaactaattaagattttttgaggaggatataaagatgaaaaaatcaattaaattagttaatgtactttctgttagtgtactgactttaggacttgtagcacctgtaaccacagtttctgctgatactgctaattctgataccactgagtcaattaaaaataatgaaacaacttcaactcagtatacagtaccatctcaatttaaagaaatagataaatatgtaactgttaaagataatcagtacgtactcagtcttccacagaattcaaacattaatacacaagctaaaaaaaatgcagagagtcaattaaatattgccaatcaagtggtcaaaaatcaaaatttagtaattgatccacaaactaaatttgcagatccaatatctcttgatactaattctccatttatagcacttgctaagcgacctgcaaatgaaaatagaacatatccttggggcgttagatccatctttagaagcaatgctgctgtaagaacacgtgtaaatatatataacaatatttacattggtgccttagctgtcggagatgtgtcagggacagcaggtatggttggtttcccttgggcttctttaattggaactttaggcagcgctgccgtatcggatagatgtcaaacttgggccaatagactacaaagttataataactctcatagaaaaagtaaaatttatcaagatataaactgggcacttcaagattcagaaggtgtatggcatgactagcatcattgtgtttatcgctgttacaattatggcgatattcaccgcgattagcatctataaaattatcaatgcacgcgtaacctataaaaaatattatccctatcgaaaattagttactgtaactctgattagtcttccgtggatattcctagtttttccatttactctagattggagtacctatatcactttagtaatagtcagaattccatatacaatcatctggagtttgttaactgcggtaggattgtatattgatattaagatgcaaaataaatatcgacatcacaggaataacaatggacactaaaattttaacagcaatcatcttaattatcgtagtaattgtactagcctactcaccgttttatcaaagatatcaactattttacttgaataaagtaggctattgggatatcctaatccaattcctagtaattgcaggtatcaacttattcattggattaaaatacggtctaggtgccctgtttctattaattgttcctattccactagacattattttcttaatttcaatgatttattcctactttagaattagaaaattaaaacgcaaataactcaacaaaacggagccaactaaagctccgttttttgcttgatcttatttttcttctgtttcggcgttagattcaaagccatcgcagccacgacaaccaacactgatccgacccaatccatcggcatcattactaacccaaagaaaaggacagaaccaactgtagctgaaaatggctcaaaagcatctaataaacttacagttgatgggattacataccgcagcgcgtttgccataatttgaaacggaataatcgtcccaattacaataactgccgcagtatacagccaaacttcaggcttattcggaactgcatgaaattgcggatcaattatcaacaaactgattccagcaaaaatcatcccccaacctgttacaaccatactagaaacttttttaacaatgttaactggaatcaaagtataagcagcctcaccaaaagcggataaaatgccccaaaatagtgcaactggcgtaatggccaaatgattaaattgcccatgcgttgacaataaaaacactcctaaaaaagcacataacgccgctatgatatccaatctacgcataacttgcttgtgcgtgatagctaaatatcccaatacaaaaaatggcccaataaattgcaagattgtcgcaatagaagcattagccacttgaatacacataaaataaaatagctgcactggcaataatccaaatatgccataggctataataaccaaaacattgtgcttatttttcaacgtagctattggtttttgctttaaaaatcctgaggcaattaataaaactgctcctgaaataatcaacctgacttgggttaaccacattggtgttaatttaggactaatatcaaacaatcctttagcgaataatcctgacacaccccacattacagctgccattgccgctagaaatgtccacaatcttcgtgtttttgctggtaccatctagttcacctttttctttctcattcacctaataattaaaccacaaaaataaggatacctactgggcatcctcaactttattgatgagtttttttaactttctttttcttaggtgaaatattcaaggccatagctgccagcacaactaaaatcgaaccaatccagtccattggggtcatcaccaaaccaaagcaaataactgaaccaacggttgcagaaaaaggctcaaaagcatctagcaaacttgccgttgatgccttgataaagcgcagcgaattagtcattaattggaatggaatcagggttccaatcacaatcactgccaccacatctagccatacatgtggcgtattcggaatatgcggcatctgtgggtgcacaatcattaggcaaattcccgctgacagcaatccccaacctgtaacgactaaactagaaactcgcttcaacacactgattggaattaatgtattggtcgcaactccaacagctgaaagcaaaccccagaatagaacgctaggcgttaaagcaaagtgattaaaacgcccatgtgtcgccagcaatactacgccaataaaggcacagatggcagcaagcacatctattcgccgcattacttgcttatgcgttacagctaggtagcccattacaaaaaagggaccaacaaattgtaaaatcgtggcaatcgaagcattagcttgttgtactacaataaagtaaaacaattggactggtaataaaccaaaaatcccatatgcgataatcgtccacgcgtcatgcttatttttcattgtagcgattggcttttgctttaatacgccagctacaattaacaaaataatgcctgaagttaccattctaatctgtgatagccacattggtgtaatctcaggactagtattaaataaactcttagcaaatagacctgatattccccacattatgcaagctaatccagctaaaaaggcccacaggcgccgttgtttttgtgtaaccattctttttaatccccaacttttctaaaactaacatactctatcataacaaaaacgggctagcttgaactagtccgttaattttttattcatcatttttcttaattgggtttctgctaggcattagctgcatgaatgtagcaacaataattaaaaagccaccaaacatgtccattgggccaaagtccgcatgaagcagtgaaactgacaggatcgttgcaatcagtggatcgaaggctccaagcatccctaccgtacttggttcaatatactgcacactagataagtacattgtataagctaacaatgttccaccaataataatataaacaattacccaaacatcaactggtgcaagttttggcattggttgagtgaagtaaattggtaaaaaggcaatgcctgcaaccaacattgctgcgccgattactggaatcggcccatactttttgaataatttcccaggtaatactgtattaatcgcttcagaaaaagccgcaattaagccccagaaacaagcaagcggtgataaagcaagttgatcgaatctgccacctgtagccaagatgaaggttcatacaactgctaccacaattgaaatcgcatcaattcttcgtggccacatcttacttctcaatgaagaatatataattatgaaaactggcgctaaaaattaaatcaccgtcgctgtcggagcattgctgtacttgactgctacaaagtacgataattgtgagctccccattcctaagaaagtaaaaatgatcaacataatgattacttttttatcatgtagcattgccttgacttggtccaagtatttccaacaagcataaatcataagcagggcgcctgaaaaaagcaaacgcagacctacaagccaagcagtatttacattagtgctagaaaataaaaattcaaccgccgtacccgatgcaccccaaaaacaggcaccgacaacagctaaagtcaatcctttataacgctaattcacattcacacatcctttagattaatgtttttcattgtaacatgggctaaaggaaaagttcaatgcttctaaagttgatttaatctatataacgtataacctgacacgctagccaataagccgattgtaaaaagcaaccaagattctggatgaaaggcaattaaaacaagtgaaagaaagcctgctgctaaactagaattgcgttccattcgctttttgccaaaaagcagaccacacataatgccaaacatagttagcacataaaatgagtcaactaacagtaacaaattctcaataattgctagatcacttggctttacttttacactcaaatcagtaaaaatctgagcacagccaaaaaataccatcacaaatgcagctaagatcgtgataaagctaatcgtacgaaaaactgacttcaccttttgagttggcgtttcatcgataaaggtttttaagaaaaactcgtgatctttttttgctactacagctctgcccatcttcttgtcataccagttcaatagaccagaaccaattagcataatagcaatcacagcaaactggatgacaattaaacgcatgaaaattggaaaggcatagattaccgtcaataacaaaattactacatagatcagctatgcataaagaaagaaatgcagacgctgtttatttttgaaaatagtttggaatgtttttgaattaggatcttgcataagacttctccccactaaatcttattacgaaaactcaaccagaaatttgccccactgagaatcaagccaataacagaagctacttgcatgcttggctgcatgaaaagcaagatcagtgataaaacaacagttaaaacgctagacgcacgaattaatttacgattcccacctaaaataccgacctccacacaaaagagtagaacaacatataggccatcaccaatcagccaaacattttcaaagagattggcaaaattaccggtaagcggcttagccaaaatgtcagtccaaagctgacgtgcaaaagcaatacttaaaccgatatttgcccaaaagagcaagaattcaaataagtgaagaaatacgtttttagtaaatctaatactagtcagtgtttcccagaatgtatcgtgttttttaatcactatccttcgatcaagaaaggcaccaattgaatagtaaatcagaattgcaatcccttgaaatgcaatcaaatgcataaaaactttaaagtcaaacatcaatgtgaatagtaaaactactacataagctaactcaaaatataatacacagcgactaaactttcgctcgctaagccagtgcttcaattctcttttattcatatgatcactaatattgccattcatattctcaccatcttttaataattatctaattatgcaaaaattgtataatgatttcaaaattttgtctagtccttttataattgatttagtaaatatttttcgaggtaaattatgaattatcccattttaattgctattttgatcttcttgctgtgctttggccgattcatttggatcattactcacgaacgtcgttccttacgcgctggagttagcttagttatcaccttatttagttttttttttaggtgtagtcattctggttaatatcgctgaccttgatccacattacaaagactggattttgccattatttgtgattgcgctatttgctgtgatggctggaacgattatctttgcattaactttgatcattatgtttttctacgatggcattaaaatcattatcaaagaaggaaaccgctggacaaattatctttctctgggcatggggatttccattatcttcttcctatttttatatcctcttgtgggacgaattagtcatgatagctggttaaagtatccctatatttttctatggctagtcatcatctacttagtcactatcatgatgatgtatactttaacttcttggattaatttaattaattggcacatgccgcacttagactacatcgtagtgttaggcgctggcattatgggaacaaaggtaacaccacttctggcagctagaatttcccggggaatagaaatttatcacaaaaatcctagctctaagttaatcatgtctggtggccaaggacctggtgaagacattcctgaagcagctgctatggctgaatatgctgaaaaactgggtattaataaaaacgatattattatcgaaaataaatccaaaactacccagcagaacttgcaattctcacatgcactgatgaaaccaaatagtcgcttctgtattgtaaccagctcctaccacgtgtatcgcgctctggttttagctaaacgtcaaggactcaagtgtactggttatggtgccaaaactaagtggtattttactttaaatgcttttgtgcgtgaattcattgcatatctggtaattactaagaaaatgcaattgactatcatcggttttctagcagctatcatgattgctgctgtcgcatttcatttttaatttattgcgttaagttgagaaacttagcgttttttattgatttatcttttaatttttttataattatagtcaaatctatagaaagcaaggtgtaactatgaggattcgtaaaaacaacttgtcaaactgtcattagtcaggatgacgagtcctgactttttcaaaaaagcaggttacttatgtcagaaacaaaattcaataaaactcttcttagtgtcagtcatgtggatttttcctaccctaagcgcaatttattcaccgatctaaatttttctattgctaatggtgaacgtgttgctctagttgggcctaatggaattggtaaatctacactaattgacctaattcgtaagcaaatccaaccagatgatggacagattatttgtcacggtgaaattaattatgtacctcaagtcaatgatcaaactgtaattaatgactcaaagagcgctggtgaaaagcgattagctttaattgaaaatactatttggcttcctggttctcttctcttattggacgagccaacagtttacttagatgacacaaatatccagaatttactctacttactcaagaattatgatggagcaattctagtagctagccatgatctggattttatcaaccaactatgtgagagaactattattctgcagccaaataatgcagtttattacccaggaaattacgcacagtatctcgaacaaaaacaattagataaacaagccgtacacaattttaacgaaaagcgagatatattaaagcaacaaattactgaaaaagtctctactttaaagcaaaaaagtactgactataatcattttgctaaaacacaagacaatactggtcactatccttcacggagccatgatcatgtccaaaaaggattaaatagtcggcttaagcgagctgaacgtgaactggctgagcttccagagaaacagcatctatatcaacatcaacttaaacttcctgaatttaaaaagtggccgactaaaatacataattactctatcaaaatagatcaattactcagtccccaaaataagactttattatctaatacacagttaaacttgcaaacagccgatattattggattaatcggccccaacggctgcggtaaaacaacattgctcaaatatttagaacactacattaatcagcagcaatctttgccaccagccagctacattggtttaaatacgactaaacaaaagaaacctgccacagtagcagatttctttcacgagactattttgagcaaaactgaagttaagcgtcttttagttaaaatggatatgtttgtcgatttgactacaagactcacggatttgagtggtggcgaatttgctaaattagcattaatcaagcagctataccttgaacaagaatctattctattacttgatgagccgactaactatcttgatccagaaagtgtgacggccttggcccaaatgctaaaacagtcgcatctcacttgtattattgcatcccacaattgcaaatttttaacccaattttgccaacaaatctataaaattaagcagcaaagactaattgaattgcactaaagcatttctcttaaacacatatttgctaagcatatcctttactatccccatctatattaatgaagatcacatttggtgctgcagaagtttggtgcgtttctttattatatttaccaccataatactcataacgaggtttccccttgccaaaaggatctattcggcaaagaaagatcacatatgtcgctttgaattctttttccggagagccacctagcccgccatagattatttcttcctgataagcgttggcaacttccagaatgttttctcctggttcttgcgaccctacttgaattattaacccgtatttattgcgcttcttgtctcgcgcaattacatgtacgattgctttttcatctaagacatttctatttggatcatcaagtgattttgcttcctgaatatcgagttcgggaagcattctttgtactgctggaagaagctgctcattatacttcttcataattcctgcagccaagtgatccaccattgccggtgacatttcattttctaacataaaaaaatcctcatttctaaaaatctgagagttttatccctctattacttattacgcaaaaaaacgcaaaaattttttcagaaaatgaagatttttcaattttttagttttcttttctaaaaaatggactgagtagcgatacaagcaggccgtaaataaaataccagcgataaatatctgccaagtcttgattttgaatccacaaaattattgcaattactgtcagtaagccacctaaaaagattgttgaacccatatttttatcagtaaagaagctgatagcagcacctaaggtaattaacgctaccaaactataaatgacgataatcactggtcctttagtctgaacgttaacatcaagcattggtgcgttagtaaacagctgccacacgataaaaccagctaatgcaatgccacatagcaatactagtaatctaaaaacaaaagttaaagtctttttcattatttttctcctgtatgcataataatactagtataacagcaatatcgcggcatacgaaaagcgcttggatttttccaaacgcttttttactattcttttgcttgcataaattgttttctagtgatgtatttgattgatttaacgtattgccccttgtgttgaattgaaatatattggcctgatggatcgtagccgccaacctttttcaacaataaattctttttcgtcttaggattatacgccttcacattgtaataccgctgtgtgcctttatctacttgagcatagcttgtttcctgggaaatgaatggattcaatctatcagtaaaagagttatgaaatgaaaaaatgcagattactcccactactagcactagtgccgttacaaatgcggttttaatagtacttttattcataatattcaccttcatcgttcaactattgttatactaaaatagtacactcattcaatgaatttagcaattgttttcatgaaaaaaacgcttgaaaaattccaagcgtctttcacctaagccaaaaatctttttatagcttcttctacactagcattcaatgattggtgcttcgttgcagcataattagccaatttttcatgtaatgaaggatcaatgcgcacattaaaattacctttaaaaggtttctctggtataactccatcttccttacagctcattagataatcatcaatggctccttgaaaatccttctccaattcatctattgtattaccttcgtaagaaataagactcttaatcccctgaaccttaccaaaaagaatcttatcctccaaagtatattcaattgaaccttcataacccttatacttcatatattgattagtttttttcatctttattcatctctttgattttatcttgaatttgtttgatttgatatggtaatagttcttttctaggatgtggtttatgaagaatgagactgtaaaatagtttgtgtaaggatgaatgattccttaaatttatttctttaaacattagaaaaaggagttcctttctcgtatgattggtttgaacaaaaaaacacatacagaaagaagaactccttcatgaatgattttaccaaagattttgctcaagctctattcaatccagacaaaataaatgatttattgcgcaaagagctacaacaggctgttaataacttgttagaagctgaattgaccgcctttctgggctatgatccctatgccagaaatggctggaatactggcaactctagaaatggtgcttatttccgcaaagttgatacgcaatttggcccaattgaagtgcaagtgcctcgggatcgcaacggtcaatttcatcagcacacgctgcctggctacaagcagcactcggatatcttggaaagcatgattatcaagctttactccaagggcgtgaccaccagggaaatagccgatctaattgaaaagatgtatggcagccattacagtccagctcaggtatcaaatatttccaagcagatgattccaaaggttgaggcttaccacaaacgcaagctaagcgacaagtttttctgcgtctatttggatgcgacataccttcctttgcgccgagaaacatttgagcgtgaagcagtctatattgccattggcatcaagcctaatgggcacaaggaggtcattgactactgcattgcgcctagcgagaacattgaagtctggacagatatgcttcaaaacatgaaatcccgaggcttaaagcaagttgagctttttctttctgatggtgttgttggcatgaaaacagccttggccaggacttatcctaaagctcattttcaacgctgtttggttcatgtcatgcgcaatatctgcgctaaagtacgcgtcgacgatcgtgaaaagatcatgaacgaattcaaacaggtgcatcaacagacaaacaaagaagaagccacagctgtcctgcatgacttctataccaaatggggcaaggtttacagccatgttatcagaagcttgaaagacatagaaccagatctgctggtcttttataactatcccaagcagatcagagcttcaatttattcgactaacatgattgaatcatttaacaatgtgatcaagcgcaaagctaagcctaaggcagagtttccaactgaacagtcgcttgatgcttttattggcattcaggcaatgagctacaatgaccgttatttcaatcgaattcataaaggctttggtcaggttcaggacaccttagaatcctactttgattaaataaataattaaaaaatcaatttacgagaaagatctatttacacaaaagatttgacagtttctgaagaatgatccgatcactgccctttttaaaaataattctagatccactcgtttttcctttattatcgagttgataatctagttcatgcaatagtgttttagcatctttaaagtcaaacgttcttggatgactatataactttattaatagcttttctaatttacccacgttatcctcacttaagtatataatataatatatcatttgtaactaaatttgcaactaagacaaattatacctaattcgctaaattcacgctactaaaaaagcgcttggaaaattccaaacgcttcttttgtttaatcatctagacctaacttcttaaagatatcatcaacatgacgcaaatgatagtgataatcaaatgcatcatcaatatcttccttggataggtaattcataatttcactgttttcaaccaatggcttaaactgcttttgctcattccatgatttagcagttagcttctgtaccatatcataagctttttcacgagatagacctgcttcatcgatcaacttaagcaacactcgttgagagtaaattaatccatatgtacgatccatattcttaagcatcgtttcagggaatacatctaagttagtcaaaattcgattgaagcggtgcaacatatagtcgacgccaatagtcgtatcaggcaagataactcgttcggcacttgaatgagaaatatcacgttcatgccataacgctacatcctcgtatgctgtaacgacatgtccacgcattactcgagccattccacagaggttttcagatccgatcgggttacgtttgtgtggcattgcagatgatcccttttggccagcgcggaaatgttcctcaacttcatgaatttcactgcgctgcaagccacgaatttctgtcgcccaattttcaatactagtagcaatcaatgctaatgtcgcaatgtattctgcatgcaaatcacgaggcaatacttgactagtaattggctgttgtgtcaaacctaattgcttcattacgctagtttcaactgcaggtggaacattagcaaaagtaccaacagcacccgaaattttgccagattcaacgccttttgcggcatgttcaaatcgttcaatatcacgattaatttctgcgtaccagcgagcaatcttgagaccaaatgtagttggttcagcctgaacgccatgtgtacgtcccatttctactgtgtacttatactttttagccttttctgcaatagttgcttttaattcgtgcagatcttttctgataatctcatcagcttgtttaagtaagtagccttgagcagtatcaaccacatcagttgaagtcaaaccaaagtgcacccattttttctcagggccaaggctttcagacacagttctagtaaaagcaaccacgtcatggtgggttacttgctcaagctcagccacacgctctgcagtaaagcttgcattcttagcaatcttctccgcatctgcttctggcacttcaccgagttctgcccaagcctttgttgcggcaatttctacttcaagccaagctgcatatttattttcgtctgtccaaattttccccatttctgggcgagtataacgttcaagcataaattacatttcccatggattcttcaaaacaatagtttgttcacgatctggaccaactgaaacagttaccaaaggaacgccaaccaactctgaaacgcggttcaagaatttcttagcattttctggaagagcgtcccaagtcttaacttgagtaatatcttcatcccaagctggaagttcttcatatacaggcttacatctgtataattccttcaaacttgctggataataatcaatcttttcaccatcaagttcatatgcagtacaaatcttgatcttgtcaaagcctgaaaatacatcaagcaagttcaagctaaggccattgataccagcaacacgctttgagtgacgcaatgcaacggagtcaaaccaaccaacacgacgtggacgaccagtaacagtaccatattcatgagcagtttcacgaatacggtcaccaacttcatcaagcaattcggttgggaaaggaccggcaccaacacgagtagtgtaagccttgcagacaccaattacagtatcaagacgattagcacctataccaatacctgaacaaataccaccagaaatagtattagatgaggttacaaatggataagtaccttcatcaatatcaagcatcacaccttgcgcaccttcaaataaaactttcttattttggtcaagtgcatcattcactaagacagaagtatcagttacatacttcttcattctttgaccatattcatagtatttatcaaaaatgtcttcaaatttaagtgctggcttaccataaaccttagtaaataattcattctttacttcaaggttagcacgcaatttttcttcaaaggtgtctttttcaagcaaatcacaaacgcggattccaattcttgaagccttgtccatgtaagttggtccaataccattcttagtagtaccaatcttgttagcccccttagcttcttcttgatattcatcttgcttaatatcataaggcataatgatgtgggcacgattagaaattctcaagccactagtatcaatgccactcttttcaagattttctaattcgccaaacattacttctggattgattacgacaccattaccaataactgtattgtccttggctgcaaaaataccagaaggaattaaacgcatcttgaaagtttgaccattaatatcaatagtatgacctgcgttgttaccaccatttgaacgaactgcaactgcagcatccttactcaaaaagtcagtaatctttcccttaccttcatcgccccattggcttcctacgactgcgactgctgtcatttaaaattcacctcataaaaatctctataaatattacgtatgctagtctagcaattaatttacaaataatcaatataaaatccgaattattttatttttaaattatttcatagttcgattttcatattgacaaacacaaattattcccatatagtatgtctcggtcaacaaacaagattaaagggagcagtttttaaatgagtaactactttagtatggaagcctttgactatgatgatatccaacttgtacctaataagggtattatcaaaagccgtcgtgatgcagataccagtgtcaaattcggaaaccgaacatttaaaataccggttgttcctgccaatatggaaagtgtcattgatgataaccttgctatttggctagcccaaaacgattattattacgtaatgcatcgttttgaacccgaaaagagaattcccttcatcaaaatgatgcatcaaaaaggattatttgcatctatttcggtcggcattaaagacagtgaatatgattttattgatgaattagtcaaggaaaaccttaaaccagaatatattactattgatgtagctcatggtcactccgtttacgtgattaagatgatcaagtatattaaggagaaattacctgattcatttttaacagcgggcaatattgctacgccagaagccgtacgtgaactcgaaaatgcaggcgccgacgcaaccaaggttggtgtgggacctggtaaagcatgtattacgaaattgaagactggctttggtactggtggttggcaattagccgcattaagaatgtgcagtaaatctgcttctaagccattaattgccgacggtgggattcgtcataacggcgatatcgctaagtcaattcgttttggcgctaccatggttatgattggttcaatgctggccggtcatgaagaatcacctggtaatgtaatcaaaattaatggtaaaacttacaagcaatactggggctcagcctctgaggttcaaaaaggtgcttacaaaaatgtagaaggtaagcaaatgttagtgccataccgtggctcaattaaggatactttaaaagaaatgaaggaagacttgcagtcatccatctcatacgctggtggtcgcgatcttaattccattaagttagtcgactacgtaatcgttaaagacaatatttttgatggtgataagtaattttaataaaatttttgcatttttattattttcctgttaagaatattacgataatatagtattatctatcttttttcgatagaataatataggtcgagttattgtagggtagtcaataactcggctttttttgattattttttaaaaacgattggacagagttttaaattgtgttatactagttgtcgttgatgaatgcgcccttagcgcaactggatagagtgtctgactacgaatcagaaggttgaaggttcaaatccttcagggcgcacttaaaaacgggaaatggctcagtttggtagagcacctggtttgggaccagggggtcgcaggttcgaatcctgttttcccgataagttagccgcacttcattgaagtgcggtttttttgtgtaaaaaaataagtattccctcggaaatacttatcatgctatgcccctttagtagctcgtctaaagataatctgtgtatctgaatctacatatttcaataacggtaaatcgtaatccttaacctgggccaaaacatttactttctcattgcatggcaaatcgcgtttagtaatctcgatttcgccttcataacgcggatacaaatgattatcaatcgtcacgctgccagttggtctagcataaatattatcttgcggctctgttgacaaaaacatcttttttctgctttcctttaagcgaactacgtcacgcgccacatctggacgattatgccaatcattgccaaacaattctggtatatcagtatctaaatgcagtgtaattgcaccctgtttttgataattagtaatcgattcaattgcatccctcgtaagttgcggatctcccacaaaaatgtgatcgcaatcataatctttcaattctaagatcgcagctaatgggttttcatatcgctgcttctccaacgttggcaatcctgcaaaaattggtccacgcaatttgccatttcctgaaataaaggctgctgttttcaaaccatattgcttaagccactcattcttcttttgcatccagtgtgcatcaagacctgtttcaggacgtgggtagaagttatgtcctgctgttaatttttcaaaatttgcattgctataacgcagatcatcaatattttgttgcgtaataatgctggcatttagaactatcggcatttctttggacaacttggcaataatatcagtagaaaatccatgatctactctaagaccagttagactcaaacttttaatttgctcaacactattgacattaatacccaaatcttgcagatcatctgccgtgacatctgcaataattttcaagtctagtttttgacaccaattagttaagtccgccagccgatttaaaatcgtctcactatcagtatcaggtacagctagctgagtaaaaacgcaggtaaatccactattgcgcatcgtcagcaaataattgtaattctcggacgtcaaatcgtgtcctagataaacagaaaatcctaacattcttattcctctaaaattaattaatttcttttattatctataacttaaacgagactgtaaaatagtttgtgtaaggatgaatgattccttaaatttatttctttaaacattagaaaaaggagttcctttctcgtatgattggtttgaacaaaaaaacacatacagaaagaagaactccttcatgaatgattttaccaaagattttgctcaagctctattcaatccagacaaaataaatgatttattgcgcaaagagctacaacaggctgttaataacttgttagaagctgaatttactgcctttctgggctatgatccctatgccagaaatggctggaatactggcaactctagaaatggtgcttatttccgcaaagttgatacgcaatttggcccaattgaagtgcaagtgcctcgggatcgcaacggtcaatttcatcagcacacgctgcctggctacaagcagcactcggatatcttggaaagcatgattatcaagctttactccaagggcgtgaccaccagggaaatagccgatctaattgaaaagatgtatggcagccattacagtccagctcaggtatcaaatatttccaagcagatgattccaaaggttgaggcttaccacaaacgcaagctaagcgacaagtttttctgcgtctatttggatgcgacataccttcctttgcgccgagaaacatttgagcgtgaagcagtctatattgccattggcatcaagcctaatgggcacaaggaggtcattgactactgcattgcacctagcgagaacattgaagtctggacagatatgcttcaaaacatgaaatcccgaggcttaaagcaagttgagctttttctttctgatggtgttgttggcatgaaaacagccttggccaggacttatcctaaagctcattttcaacgctgtttggttcatgtcatgcgcaatatctgcgctaaagtacgcgtcgacgatcgtgaaaagatcatgaacgaattcaaacaggtgcatcaacagacaaacaaagaagaagccacagctgtcctgcatgacttctataccaaatggggcaaggtttacagccatgttatcagaagcttgaaagacatagaaccagatctgctggtcttttataactatcccaagcagatcagagcttcaatttattcgactaacatgattgaatcatttaacaatgtgatcaagcgcaaagctaagcctaaggcagagtttccaactgaacagtcgcttgatgcttttattggcattcaggcaatgagctacaatgaccgttatttcaatcgaattcataaaggctttggtcaggttcaggacaccttagaatcctactttgattaaataaataattaaaaaatcaatttacgagaaagatctatttacacaaaagatttgacagtttcacttaaacgctttcctaaatatcttactacattttttgcttgcttttttctaaaaaataatgttaaatacatataaacaaattaaaaagcgatgaaaaagacgagtaaataatctaattctttccagtgaattagtgctagtgtgaaactaatagaccctggattattgaaaaacacttttagcagctcactgaaacaacaattcttagagtaggttgagacgtctccggtacgttaccacgccggtggagcatgatagtgcttcatgagtcggtctattaaaatatagacaatgtgggtggtaccgcggaaaaaagcctttcgtccctgtttttttagggagcgaagggctttttctttgctctaagtacattagaaagaggacttatattatgacacttattttacctaaagattatcacccaacattaactgtgcgcgacactgaagctgcgattgtatttattcgtgaaaccttccaagataaattggcagaaattctcggtttacaaagaatgtccgctccaatgtttgtcgaaaaaaagaccggcttaaacgacaacttaaatggtgttgagcgtcctgttgcctttgacatgaaggcaatgcctaaagaagatactatcgaagtagttcactcattggctaaatggaagagattggctttgaaacgctatggtttcggaatgcatgaaggactttacaccaacatgaacgccatccgccgggacgaagatcttgataacttccactccatctatgttgaccaatgggactgggaaaagattattagtaaacaagaacgcaacaccgacacacttgaagttactgtgatgaacatttttaaggcaattaaggcaactgaaaagctggttgctgcacgctacccaggctctacttatcgcctagctgatcacgtttcatttattactactcaagaattagaagatcgctggcctgatctttctccagaagagcgtgaagataagattgctaaagaagaaaaagccgtctttattatgaaaattggtgacaagttaaagcgtagtggtgaaccacacgatggccgtgcaccagactacgatgattggcaattaaacggtgacttagtcttctggtatgaaccgcttaacagtaagattgaaatctcttcaatggggatccgtgttagcgaagaaagtttgcgtgaacaattgaaaaaagctcactgtgaagaacgtgagaaattaccattccaccaaatgcttttgaagggtgaattaccttattcaatcggcggcggaatcggtcaatctcgtctctgtatgttgctgttaggtaaggctcacattggtgaagtacaagcttctatttggccagaagatatggttgaggcttgtgaagctgacgatattaagttgctgtaattttaagatttttttacataccaaaaaagatcctgcaaaatgatacaatcccactaaagtggacgattgaaatacataaagtattcaattatccatggaggtgggattttttatgtccagaaaaagtaaatattcattcgatcaaaagatatgggcagttgaacaatacttgaatggtaataggagcagcgttgaaatagctaaacggcttaagatgccaagtaaaagtggagcgatgcaagtaagaagatgggttcatcaatatcaaagcaatcgtgatacccttctaagtaatgctcaatacaataatcattactctaaggcatttaaagaaaaggttgttcaagaatatttagctggcaaaatgtcgttaccttctttagctaataaatatggcattagaagcaatggaacagtatcagaatgggtttccaagtataatagtcatatagaaaatcgggactatgatccccatccggaggtctatatgactaaagcaagaagaaaaactacccagcaagaaagaattcagattgttcaatactgtcttaatcacgacaagaattacactcaaacagctgtcaaatttgattgttcttaccagcaggtttacagctggacacacaaatatctagctaatggtgaaacaggattaacagataaacgaggcagacataagaagccagaagagctaactgagttagaactggctaatcgaaaaattaaggaattagagcgtcagctcaaagaagaacaaactaagaacgaattcctaaaaaaattagatcagttagaaaggatgtgcttgccggacaaccaagatacagacaagccgcaataaaaagacgctggaaacaagaaacatatcagttaatccatgactgccatcaaaagtacaattggaagattgatttaatgtgcaaatgggctaaaatagcacgctcagcttattacaaatactttgatcctaagcgcaagccgagtaagcgtgaagaacgagacaaaaagattgaagcaaagatcattgaaataacccagtctaacaacagtctgtttgggacggaaaagatgaccatggcagttaatcgacagatgtctgatgaaaagccggtttatcataaaactgtttaccgcttgatgtgtatcaatggcattagatcacaaaagcctagataccagaagctaaagttcaagcatacaacgcctgagaaaacggccgaaaacaagttaaaaagagactttaatgcatctagacctaatgaaaaatggtgtacagatatcactgaagtcgttgctgctaacctgcctaaggcatatctatgtactgtgtttgatctatatgatcgctatcctgttggctacgcaattagtaaacgaaacgatactgctttagttcaagcagcctataagcaggctgttaaagcataccctaatgctcatccgcttttccatagtgatcgtggttttcaatttactcgcgcacctttccaaaaccaattagaagaccaaggcatgacgcaatcaatgtctcgtgttggctgctgtattgataatggtccaatggaaggctggcaaggcattatcaaagaaatgcgagttattcttcatcctcaagtggccagttatgatgaacttaatgattctatttgtaagacaatagattactacattaatgaagatccacagaaacgttttaacggtttaactgctggtgaaatgcgcaaagaagcgatgaaaggcaatattaagaattgccctattgcaccaaatcatcgaattgagaaatactggcaaaaaatacacgaaaagaaaataagagaagccaaaaaatcctcagctgattattaatcaactgaggaataaaagctttatgtaattctactgtctacttgacagggaatgtatcaaaatgtaggatcttttttctattgattttatttccgttctcttctagaaatccaagccataatcaatggcaacaatacaaagccaaagaccatcatcgcaatggcataccagttaacaccgataacttgccctgctgcgtttactacaccaaattgtgccttccagttatattcaactaacaagaagatcacaatcacaacagataaaattggcacaataacatcagtcataacgctcttattagcctttaagatatcttcttttgccttaccacggtaaaattgaataactgctagaggtaccacgatgaaacctaagaatctaaccatcgcgctcaaagtaatcaagttgaccatattgtattcaaaggccatcggaatcaaaattgccaagccaacagagataaagaaagttctaattgggaagttattcttagttctcttagttaaagcttgtgacatctgaccctcacgagccatagcttccagaatacgtggagcattaaagctggaagctacgttgatcccaaacattgaaaccaaggcaccaaccaagattacatcacgtaagatttcattattaaaaatagccgcaatcgctacaacttgcttagttgtcattaaagcacgtggattaagtaccatcgctaccgctacaacgccgatatagacaaccgcaataattaagattgccaatggaattgctcgtggcaagttcttttcagggttcttcatatcttctgaaccagaagctactgattcaaagccggtaaaggcatagaaggctgaaacaattgacatgacaaaggtagttgtagttaaagttggcacaattttctgaccattctgagtcaattgatctacttgccctaggttgcttgatgcaccagtagtaattaacaaaactactccagcaataataattaataccaatgcagccaacttaccgatagtagctaaattcattacatacttaactactttttgaccaaacaagttgatcacggtaataattgccatcaagatcaaaaagccaattgtgacatttattgccttattgggatttccgccaaaaattgaaatagttgacttaattaccccaacagccattacgccccaagctacactggctgagaagtaacgcagaactcccatataaaagccaatttttttaccaaaagcggccttggaataagcataggcagcaccagatttagtgacatactttgaagctgccgcaaacgaaatggccagaatcgctgcaaaaattgccgcaattaaatatacaactaaagctttactaccggcttgctgtaccacactaccaggtgttaaaaaaatacctgaaccaataatggcattaatcgctaacagcacaattgaccaaaagcctaatttatctcctgttttttcagtcatctatttgcttccttactttgcattatcaacaacaaacttaaataagttattcataaacgctacatcggaattacggtgcaacatttcagggtgccactgcacggcaatgacattaccttgtttattttctagcccttcaaccacaccatcaggagctgttgccactgcttttaaatctggtgcaacgtctttaattaattgatggtggaaagaattaacgcgaaattcagttttgcccaaaatttcagccaatttactatcagcttccacttccatactatgagtaggcaaagttggcgtatgaccttgcatgtgtttcaaagtaagttcttttctgtatgaaagatcttggtaaagcgtaccgccatgagccacattaataatttgagcaccacgacaaatgccaagtaccggaataccattttcttctgctaactttaacaagcgcatatcaaaatgatcgcgttcaggccaagtatcaccaatcttttgcattggctcctcaccataaaaacgtggatcaacatcatgcccaccagataagatcaagccttgaacatgattaagctgttcacgaatcacctcatcattttcagtaaatggaataatgtaaggcacaccgccattttgaactactgaatctacatagtcttcgttcacataactacgatggtatcctgggaaaattcctccatcgtcaataattacagaacctgagataccgataattggttttgtcatttatgctcctccttctgcttactttttgtatgtaatattatagagaaatttatgcaaaaagtacaattaaaaatactgattgtagctttaattttgattattctgctttttataatccttgttcaaatcgatgttgttgcaaaacatattctttgaaaaacggaagcgtaaatgcaacttcaccatagttagttgacttaataatctgatcgtctaacaagcgtctacgataattagctacaaaattgcttgggcggtttaatcgttcacgaatttctttgatcgaaacacgttgttctgaactctgggccattgctaaaacaaattttttatcttgttttgatagactactaaaaatcttcgtatatgcgttttgatctaattcaactagatattctggcttaattttatctagcagattttgatcgattattttatttttttttgcactattccaaaccaaatagcccaataattgaaaggcatacgaatagcccattgtcattagcgccattttgctaagaatatcttctgttacctgaaatcctgattgtttaaatacattgttataactaacttcgatttgagctaagtttaaagcagataaagctattctttttccgcgcaataaaaaagtcattatatcttcattttgtaactcagatatattttcaggaagccctgtcatcattaaggccacaggataatcttttcgatttaataattgataataacctgcaaaatcttttaattcacgattagacttcacttcgtctaaagtaattaaaaccttaatccccttttttcttaacttatcgaacatatttgtcaaaataccttgataagtagaaaaagtaggctgacttatctctgcagaaagctgtaaaccaaaggcagaaaaatttaagcctttaatagattcaaagattttttgtaattcatttccagctttcatatacaaactatcaactaaagctgccattaaatttgatcccatagccaaatcaacaacgatccagtcaggattcttttcaactcttttgccaatctcagtcaaaaatgtagttttgccgactccacgcatcccgtaaacaatcgaaatcttatacggactatttggattatttatttcattaaccacatcatcaatcaattgacctcgatgcaaaaaaacagcgggaattctaccaaaactaggattaaatggattgttcattttatcacctcatcaattactctatcttttatgtttattatattatttttgtgtatctttgtgtatctctatgtatcttgaattcatttgtgtatctttatgtatctctatgtatcttactgcaataaaaaagcagcaggcctctcgcctactgctcaattttatttatcttttcgatgcttaactacataaaccaatactgctacaattaacactgctgcaccaactgctactgaaatttgcgtctccggattgataaacatgaagacaacaattactaccagcataatcaaagcaaagtaatttgaatacggataaagcggcaatttaaacgggtgattctccatcaagtgtggattctttcgtctaaaacgcaactctgctagtaaaatcacaaaccatgcaaccatccctggcaaaacagatgaactatagacaataacaaaaacattagctagtgatttattcaaaaattgtgccaaaacattaagcatgaaaccaataaagatcccactagtaattccaatgatcgcatgactaggcacgattctcttagatacgtaaccaaaagtcttaggtgcttcaccttcgtgtgccaatttatacaacattcgacttgatgaataaattcctgagtttgcaccggacaaagctgcagtcaaaactacaaagttaattactgaagctgccgcggtaattcccaccttggcaaaggtcgttacaaacggtgagccaatgctatctaatttattccatggataaattgtgacaatcacaaaaattgccccaacataaaagatcaaaatccgccacaatactgacttcacgcttttaacaatggccttatgcggatcagatacttcaccagctgaaatcccaattagctcaattccttcataagaaccaacaataatggccattgagaaaaagaagcccttgagaccaccagtgaagaagccgccatgactccacaggttagaaaagcctactggatgaccgccattaccaaagccaaatagaattaccgcaaagccaagcaaaatcattaagataatcgttacaaccttgatcatggcaaaccagaattccaaggttgcataagctttcgcactagctaagttagccaccagcaaaaataaaataataattacgccggcaacccaatcagaggtgcctttccaccaaaagcgcaaatactctgttgttgccaccacctcagaaattccgacaacaatgtattgaaacacgtttgcccattcggctaaatagccggcaattggatgcacatgctctgaagcatagtctgcaaaagaaccagtacctggatcaacataaagcatctcacctaatgcccgcattacgatatacaaaataaccccaacaaaaatataagctagcagtactgaaggaccggtccacttaatggttgagctagcccccatgaatagtccaacaccaattgctcctccaagtgagatcatttccatctgtccggctgtcatcgaccgctttaattcaggtgctttcttcgccatttccaactccctttctttagcatctgtaaaaatttcctaggaaatatatctattctcatttatctttaatcactataccttatcattttttcgaacaaaactgtagctgatcgctaaaaagattgcaaataaaatcgaaataatcaaagccagctgcgttgatttgataaagaataataagattaaaataccaatgtaaaaggcaagcgtaagccagctagttactgggtagcccggcattttaaagctgcctaaattctgcttattctgtttgcgataaacaatatgtgctgccataatcatgatccaaacaatcacaaaacaaatcgttgaaacagttgagacaacggagaatatttctgctggcattaaatagtttaaggcaactactacaaataaaattaatgaagaggtcatcgaagcgttcattggaattgcttttttggtcaattcacctagtcttttaggtgcatggccgttacgtgctaatgaataaagtgatcgactagttgaaaagattgcactattagtcgctgacatagctgcagtcaaaacgacaaaatttaaaatccctgcagccgctgtaacaccgatgccggtaaagacctggacaaagggacttgaagtagttgtaatgtgattccatggataaacagacataattgccaacattgagcccacataaaaaaggccgattctaactggcaaagtgttaattgccttaggaatatccttttgcggattagctgtttcactagcagtttgacctacaatttctaccccaacaaaggcaaaaacaaccatttgaaatgataaaagaaagccccaaatcccagttgggaaaaagccaccatgattaactaaattagttagtgaaacataaccgccctttacatgcgtatgaagtaacaacattacagcaccggtaatgattaagactacaattgccattaccttaatcattgagaaccaactttccagttcaccaaataatccgacatttaccatgttaatcaacatcaataagatcacaattactaaagggccaacccattgcggtagccacggaaaccagtatcttaaataaattcctgtcgcagtcaaatcagccatagctaaactaagccagcaagcccagtacatccagcccgctacaaattcggcacgcttacctaaatattttttgattgattctaaaaatgaatgactttcaggatcggctaagatgagctcccctaatgcgcgcatcataaaaaaggtgataatccctacaattaagtacgacaaaataattgaagggccagcactatgaatggctgaaccagaacctaagaataggccagtaccaatggctcctcctattgcaatcattgttacatgacgacttttaagcccgcgttttaatctcggcttctcatccataattacttcacaccttcctcaaaataaaaaatggagcggcatgttttttaaatgaaacatgttgctccatcaagtttgctttttttgaattatatagtcttatgccaattcatgcaattattttttatctaaaaaagatattcccttaggaatatcttcattattagtaaactttaaattggttcaacggccagtaacgtactttaactacgccaacgatactactacgcttaatggttccgatataacggctatccttagaaacgctccggtgatcacccattacgaaatatgttcctttcggaatgcgcccagtatcctgcacatatttaatctgcgctctagtaaagtattgctggtaagtccgcgcccgcatcagtgactgcatagtaaaattctgagtctcagaataaaatgtatctgagccattatcaattaacttcgttccttgtttcaaccaaggttgagcaatctttttattattaatgtagatttgattatttttgctgacgattttttcaccaggcaaaccaataacacgcttaatgtacaaagcacctggttcatctggtgctttaacaatcactacttcaccacgcttgatttgcgcatgacgctcagcgattagccgatcaccattttgaaaagtaggttgcatcgaaggacctgatactgtatcgttgctcaagacgaagtggaaaagcagcagataggcaccgatcaaaataacccagataattaagatatctaggaaaaacttaccccatgattctttttcttcttttttctcagccattatttttctccatttatctttttccacagtttacaactttatggagaaattgccaaattacaaaaaagaggtgtaagtgtcaatgtttttgcggtagcctttaaaccattagtctaaccttaatttcttaaatatttatatgacttaaatttctgcttagcttgcttaaataactattgccagctacctgtgcggttaatgcgccatgctggatgcctaaatgaacttcatgacgcttctttaagctgtcacgggccgctgcttttaattcctgttcagtcaatacagttatttctgaatcttcaaactcgctgctaagccaaaattccagctctcgattcttgatgcagcttaagatcctaagcatgccttctgctccagattttgaccatttcttgccttgccccttaacacggtaggtatacttgcggtggttgctctcgcagcagccaatggctttagtcacagtcagttttcgtttcttaaacggcttaatatcgtcccaatgacgatcaatataattccttaggcgccccagataatcatgattgagctcggtattcaattcatcaattagtcggctttctgcagtggttaggatagttttaactttgtcatagctgtatttgtattccaaagcagaaatcagcttgccttgcaggtcaggcgcaaaatatagcctttctttgattttcttatttaggtgaaagacatccaagaaatgctcatgacgcttgcatagccctacaatgtcatcgaagtctgttttggcatatccagcaccgccatcggcgttgctaagaattacagtatcagaaagatcataagtattggccaggtactccttggcttcgttcagcgcatcaagtcggcttaaagaaacaaattccttggcattgattcgctttctgcgtttcttgcttatattgacaatgccttcacagacctgatagcgatgaaattccaaccggcttttagtgcctttgatcaccacgccatcgccttcaagatacaaaactgggacctttttcttagtgcctgcggcatcatatcttgaatctgcttcttggcccgctttaatatttttcccggccatttttaccaaattgcccacctgcatatggctaatattaaagccagacaggcaattgactgctagagcagtattgcgataagtggcaacgctgcttacttctaagatgtttttgactgctaaaatactgtagcgcttgtatttgtcaaagcccattaattcatccaagggataccttgcttgtttgcctgggcagacatatcttcttctgacatacctaacttcgccaaaagccatattgattgagcgctcattcttcttatcaatctgatagccctgtgctttaaccttggtaatcatttcatcatcaactttagctaaagccaaggccatgatttccttaatcaggtttaagaagaaacagattatttttctttcacgcttaatataattatcttcagactttataatatttgcgatttcagttacaattgaattcataaaagaccagcttctaatgtgttttttgttcttaacatcagactactggtctttttgtttgagctcaagtccaaattcaaaggacttgggcttttttaattatttattcaacttaccgtaaaaaattatacacttagaaaaggaaactgtcaaatcttttgtgtaaatagatctttctcgtaaattgattttttaattatttatttaatcaaagtaggattctaaggtgtcctgaacctgaccaaagcctttatgaattcgattgaaataacggtcattgtagctcattgcctgaatgccaataaaagcatcaagcgactgttcagttggaaactctgccttaggcttagctttgcgcttgatcacattgttaaatgattcaatcatgttagtcgaataaattgaagctctgatctgcttgggatagttataaaagaccagcagatctggttctatgtctttcaagcttctgataacatggctgtaaaccttgccccatttggtatagaagtcatgcaggacagctgtggcttcttctttgtttgtctgttgatgcacctgtttgaattcgttcatgatcttttcacgatcgtcgacgcgtactttagcgcagatattgcgcatgacatgaaccaaacagcgttgaaaatgagctttaggataagtcctggccaaggctgttttcatgccaacaacaccatcagaaagaaaaagctcaacttgctttaagcctcgggatttcatgttttgaagcatatctgtccagacttcaatgttctcgctaggtgcaatgcagtagtcaatgacctccttgtgcccattaggcttgatgccaatggcaatatagactgcttcacgctcaaatgtttctcggcgcaaaggaaggtatgtcgcatccaaatagacgcagaaaaacttgtcgcttagcttgcgtttgtggtaagcctcaacctttggaatcatctgcttggaaatatttgatacctgagctggactgtaatggctgccatacatcttttcaattagatcggctatttccctggtggtcacgcccttggagtaaagcttgataatcatgctttccaagatatccgagtgctgcttgtagtcaggcagcgtgtgctgatgaaattgaccgttgcgatcccggggcacttgcacttcaattgggccaaattgcgtatcaactttgcggaaataagcaccatttctagagttgccagtattccagccatttctggcatagggatcatagcccagaaaggcggtcaattcagcttctaacaagttattaacagcctgttgtagctctttgcgcaataaatcatttattttgtctggattgaatagagcttgagcaaaatctttggtaaaatcattcatgaaggagttcttctttctgtatgtgtttttttgttcaaaccaatcatacgagaaaggaactcctttttctaatgtttaaagaaataaatttaaggaatcattcatccttacacaaaatattttacagtctctagaaaagaggtatttcctaggaaatacctcttttattattaatgactattaattagtcttcttttttgtcttcagttttagcttcgtcttctttaaccttttcttcaacttttggagaaatatcaaagattgcttcaccgttcaagtacaagtgcttgtcatctgcagtgaattcgatcttcttagtgtcaggcttttgtaagatcaacttagcagctggagtttcaagattttgttcaactactcttctaagtggacgagcaccgaacttcttgtcgtagcccttttctgccaagaatgccttagcttcgtctgaaacttctaccgttacacccttcttagcaagaacatgagacatcttcttcaagtaaatgttgatgatcttgcccatgtcttgttcagtaagtgagttgaatggaacgattgcgtccaaacggttcaagaattcaggtctgaagtagttttcaagggctgagattaacttgtcttggtcaaccttgccatcttcaagcaacttgtctgagaagccggcgtttgaagtcataatcaagatagtatccttgaatgaaacagttctaccttgtgcgtcagtcaaacgaccgtcatccataatttgcaataatgcgttgaagacttgtgggttagccttttcaatttcatcaaataaaatcaatgagtatggttggtgacgaaccttttcagttaattgaccaccttcaccgtagccaacatagccaggtgctgaaccgatcaacttgttaactgccatttcgtcttggtattcactcatgtccaaacggattaagtgttccttgttaccaaataattgaattgccaattgtttagcaagttcagtcttaccaacaccagtaggtccagtgagtaagaatgaaccagtaggtctgtcgctgtctttgaaaatttgcttacgagcaatagcgtcagtaattacatcgatagctctgtcttgatcaataacattcttcttaagtttcttagctaagtccaagttcttttgagcttcatcagcgtgaagttcactcattgggatcttagtcttttgttcaataattgcgtagatgtctttttcagttacttctggagtattcttagaatctacattcttaagttgtttctcaagttcagcaatcttactcttaatttctgaagccttgtcgtaatcctctgccttagcagcttcagtcttcttagcttcaagagctgagatttggttctttaagctcttttcatcagttggttgtacaagcaatgccttcttagcaccagcttcatccatcaagtcgatagccttgtctggtaagtaacggccttgaatatatctttctgataattcaacagctaatttaagactgtcgtcactgtattttacgtggtggtagtcttcgtacttcttctttaagccttccaaaatcttaacagctacatcagtagatggttctggaacttgaacagcttggaatctacgtgataaagctggatctttttcaattctttggaattcactagtagtagtagcaccaattaacttcaattgaccacttgccaaagctggcttcaagatgttagctgcatccccattgttgttttctgaatcagtagaaccagcaccaacgatgttgtgaatttcatcgatgaataaaacaatgttaggatcgctcttggccttgtcgataaccttctttaatctttcttcaaagctaccacgaagacttgaaccagcaaccatgtcattaatgtttactgaaatgatatgcatgttagccattttagctggtacattgcctgaagcaattctttcagctaaaccttctacaatagaagtcttaccaacaccagcaggtccgattaaaacaggattattcttcttacgtcttgaaagaatttcaattacgttatcaatctgttcgtcacggccaattactgggtcaaatttattgttcttagcttcctcaactaagtcaacaccaattggcttttcattgggttgttgtgggttctgttgaattgtttgtggtgcagcacccatgctgctggagtaattaattggaattgaacctgaattacctttgctatttcttctgctaccaaagtcgtcattaaagaatgagctattcaattcgttaaataagttatcaaagtcattgtcaaagtatgccatatgtgcaacactccctatctcaaatttacgtctttagcactctagcttatcgagtgctaactcattacatttaatagtatagcaggttatccacagatttcaagctaaaaaataaaagttttacacattttcctttatttttgtgatttttatttaaaaaagcactacaaatgctgcaatataaacatttgtagtgcttcacaaattataaagaatttcttaagatgggcaaaaattgatgattattttgcttaaaactgttgaattttaaggaagttttccacagataagaataagtttattaccataaactatttctgcctacctctattattgcccttttgcttgtccagtattttgcggttcgctcaactttctcggctcaagcaaatactgtttaattactttgattacctgcttattctgaggtaaatccgagtgatccgcttctacacccgttactgtcattgcagtatagctcttgacttgattctgaaaaatatattttccggctgctacgctagcttctggtacaattccatcagactcataattttttccaccagataaggaataaacaatcaagtttttcggtagtttatctttgttcttgataaagttttctagcatttgcgttttatgattaatatttttttcaccaaaattatatggcgttcctagcgtcatcagacgtttgattttaatttcatcagaatagtaacagtagtaatgttctaaccaataggtccagatcaagccaccgttagaatgcccaaaggctttaaaattattaaacttgtagctctctgataaggcataaaaggcttgatcaaaccaactagcttgcttcttaatattgctataaccatcgtgattattttcaaaaccaacaataatgaaaggctcattgtcgtttttattgattttgcctgaatatgacagcgttccattcgttgaaactttaattttaagcacgctatgcttagtcggtgtgttctgatttagctgcttcactaattggttaaaacgttcagtcgttgcactagaacctggaatcataattactggtgacaaaagcgatttgcgtctttcagctctagcgtggttatcagccttcatccaagaataacccggaatagccaaagctactaataagactaagacgattgccaaccatttaaaattaggattttgaactaaattaatcatttttttcttcataatcctttagtcccctttcaagtcgcaaacctaatttcatagttggaataaacattattatatccaaaatgaataacaaaatagaaaataccaagttgctccagtcaccattggaaccaaagaaagagaccaaaattcctggtgtcccacttaaaacggggtaagcacaaggttgaattaaatggcaaaaaattgctccagcggctagtagaatattaataattggaataatcacaatcgccggcagtaacaacggatttaaaataatcggcatcccgaccatcatgcctccagttgagccaaaagctgctggaagcaggttaaccttggcaatattttcactatccttatttttactataaattaggataattacaatcatcgctaaaacaatactcgcaccacccatttctgcataaggataaaacaaagaactacccaaatacttatatggtacattccaagcactcccatgttttaaggcaaaatttaagttagctgctgaaatactattagaagtagttgacaaagaagctagaggataacctattcccatccagctaagtaaaaagactgggatagtcagtaaagctattaacaaaatattatttgattcctgtatttgagtaactaggcctttaaaagtactagaattcaagaatttgatttgaaattcataaattataatccccagaactatcccacaaaaaattgcaaatattgtcgggataaacgcattccaggctctttccttaattctagcggcatgttcaaaatcgactggcttgtgttcctttcctagccaatgaaaaatttgccctacaccatagccaattaacaaggccagcaagacagcattaatttttaaaacactggaagaaaatggtgaatgatcgctggcattattagctaaattattggcataagcacaaaacatgataacgatgacagccgtcatcccggccatggttgaatctttacggtataaacgcgcagtataacgtgccgcaaaataagccgcataaataccaaataagccgaaggttacccgaaccatcccctgactgacaaatgctcccgcataccaaaaacgatctggcaaagtgatatcaaaattaaaaatattgtaaataaaactatcgggcgaaaaaacggcatctctgaacaacttaaaatatgccccaattaccgcgatcggcatcagcataaccagcgttcgctgaaaaattctaaagattgccaatcttcttagtttaagaaagatatttgtgattctgtttaccatggtattttcctttacctatctattctaaatatgattgaataaagttaattaaaacaattattaattatacatctatactagaaagctgattatgatggcttacattaacttaaaaaataatactaaaatttaccaatctggtgacacaaccatctatgccaataagaacattactttttctatcgataaaggcgaactagtcattattctcggctcatcaggagctggaaaatctactttgcttaatattttaggcggaatggaaccaaatacaagtggcgatgtaattgtagcgggaaaaaatattgcaaaatataacgctaaagaattaactacctatcggcgcaacgacgttggcttcgtttttcaattttataatttgattcccaacttaacagcaaaagaaaacgttgaattagctgctcaaattgtccctgatgcgatgagcgccgatgatgccttgcagtatgttgacctagggcagcgagaaaacaattttcccgctcaactatcaggcggtgagcagcaacgtgtggcaattgcccgagccatcgctaaaaagccagccttacttttgtgcgatgagcccaccggtgcccttgactataaaacaggcaaacgaatcttaaaaattttgcaaaatatgagccggcaaaatggctcgacggtcttgattgtaactcataacgccgctattgccccaattgctgataaggtcatccgtattcacgatggaagtattcaaaaagtccagcataatctacatcccgctgatattagtacaattgaatggtaggtgggcgacatgcaaaaaactattctatggaaagatgcttggcaagcaatcacccattcacttggccgttacattgccattattctattaattgcactggggacttttgcctttacaggtttaaaaatggctggtcctgatatgcgagcaacaggggcagaattttttgccaaacataacttagctgacgtcactgtcacttcaaactatggcattaattcaactgatcgccttactattcagaatttaccggaagtaaaagaagctacttttggctattttcaagatgttaaaattaaaaatcaacctgatacgctccgcatcttttctcaatcagataatctttcaagttatgaattgattaaaggacattttcctaagaataaaacagagattgcactgtcatatttattgcagaaaaaatatcgcttggggcaaaacattacttttaataaacctggcattttaaaaaataagacttacaagattgttggcttcgtcaaagctagtgagttcttagataaaaatcaaatcggtcaaaccaacattggcagtggccatttaactggaattgcggttgctaatcataacgccttcgccgcaccagtttatcaaattgcccgaatcattttcaaaaataccgccaatttaagtccctttggcatagcttaccgcaaccgtgtttataacgatcaaaccaaattgcaaactgctttaaaccaaaatcgagccgacaaatatgacaaatatcgggccatgtatcaaaagcaatatcgacaagctgcagctaaacaattacttaaacgtggcatcgtagttaacccggcgcaaatcaaagtaccacagaacaagcttaaaattgcttatcctaactacgtaatcaacagccgtgaagaaagtcagggttatgcttcttatcgagcagattctgaacgagttgaagttttggctaatgtctttcctgttttcttgtttgctgtagcggctttggtcagcttaactacaatgatgcgttttgttgaagaagaacggactaatattggtacgctaaaagcactaggctatggtaatggagcaattgccattaagttcttgctctatagcacctcagctgcaattttaggtgttattctgggggctagcttaggttacacctttttgcctaacttaatcatcaaggcctatttagctagctcaaccttaggaactgattaccagctgaattttgcttggggaccactattaatttcattgacgattgcactacttgcaacaaccgtcgtttcaatgattactttagctcaaactctgcgtgaacagccttcagctttacttttacctaaaccacctaaaaatggttcacgtattttactagaatatattccatttttatggaagcacatgagcttttcagctaaggtaacagcccgcaatattttccgttataagagcagaatgctgatgaccatcctaggcgttgctggttgtactggattactagtaatgggatttggtattcgtgattcactacacggaattggcaatattcaatattctgaagtacaaaaaaatgatgtcatcgctttgaaaaaccgccatgttaacacgactgagcgacaaaaattaaacaaaatttttaccagccatgatgttacgcaaactactgctgtacaatatcaacaattgactaaacaccttgatagcactggagcaactgaaaatgtaatgctaattgcgccacaatcaactaaaaactttagcaaatctatcaatttgcaagaacgtcaaagcaagaaaaaacttgttttgtcaaataatggtgtagtcatttcagaaaaattagctactatcttgcacgctcataaaggttcaacaatttccttaaaaaatgaacatgggaaactacttaagttcaaagttagtggaatctgcgaaatgtatctcggtcactatatctttatgagcccagctgaatatgccaaagaaactggcaaaaaatttactactaatgcctatttagtaaccatggccaaacattccccaggaaatatcagccatattagtcaaaaaatgatcaaaacaggcgcaatcgaaacggttgtctcaacttcatcaaatagaaaattgctgagcagtttcactggtagtctaaatgaagtcattctaatcctaattttaatttcagggatgttggccttagtagtcatctataacttaactaatatcaatgtcgctgaaagaattcgcgaattatcgaccatcaaagtgctaggattttacgataatgaaacaacgatgtacatttatcgcgaaacaatcatcttatcggcactaggaattatcgtaggctttggctttggctttggttggtggctacaccactttattatcactagtttgccaccagatgtcgcgatgttcgatccgaatatgtacccgttgaacttcgtcttctctgcgctaattcccgctattatcaccgctattttagcaattgttgtccatcacaagatcaagcgaatcaacatactagatgccttgtcctccattgattaagcgctgttatgctataataatcactatagaaaagggtggaaaaaacatgccaagaaagcactttgaattaaacagtgatgttaataaattaatcgaaaaatatgatgaaattaataatgttgatttcaataagttagttaacaaggccttaagattctaccttgttaatcaaatgaactacaaagatgttcaagacgccctgaataaagctgataacgaagcttctaagtatattgatgaagcaatgcgttccagcatgggtgatattaatcgaaattattagaacataactaatcatggaaaaagccatctgttttgacagcaggtggcttttagtattcattacaagataatttattataaaaacaactaattgataatttctttactcaaaatgcttataccgataatatcgataacctatctttttaccaaaaatcgtctccgaagttttcatccaattagccagcaaaacataaatgcctaaaaagactaaaccgaagattgctaaataaccaaaactaccaacacggcctaagtcgttgaaacgatagccaaataaaatttggtaaacaaagagcaggataatgtaaatctcgtttgaaacaatgatcggcaacaaactccccatcttaacgccatatgtcttattaagcttgtgataactgagccaaattaccagtaagaatgaaatatcagttgaaagaattgcaccatccccattcatgaacatagtcatcggtacttgcaaaattatttttactaagacaccttcaaccatatagatcacagccagtttgttcatgttcaaagctaaaagcagtgttaatgaattcatcaccaaaccagcaaacaaactttgaacaatattttcaaccaaataatacgcacctaaactatcgtgtgagaacaagaccgtataaattggagaagccgcaaaagcaccaagtgcaacaaccggaagcaagacaaataatagtagtctatagttctctaaaagcagctttctaatgctttcttgactatcattagccttatacttaagccctgctaaaagcggcagactagtctcagaaacggctgtcgcaagtgaaataatcaccgtggtaatcttgcttggattagccgagaaaattgtgtacaagtaactaacatagcttttactcatatgactgaagctaatcaggatttgtttaaacaaaagttgatcaactaattgcgtaacagtaatgaacgatcccagcaaaacaaacggaattgaggcataccataagttaagcaaactacgagaaacattattaagtgctctgggctcgctattttcaattaattctcggtaatgtccccactgcttgcgcatatatgcaaaaagatacaggtaactagctatagcaccaacacaggcgccaaacacactgaaataaaccgccgttacgtaatcatgatggaagacttcaataatcaacaaagtagccagcaaaataaacaaaattcgagcaaattgttcccataattgggaaatcccatatggcttcatatcattatttccctgaaaccaacctcgaaccatactcattgatggcagaattactacggctggcactaatactcgaatagaaattgttgcactagccactgaatccactggactatttttggcaatcattggtgccgtcacataaagcaaaataccacacgctattcccatgaccagcataatagcgaagcctaatttggtaatgtacaaactgtctttatatctattttgcgaatttaattgcgatacttcccgggcaataactgaaggaagtcctgccgtcccaattgataaaaacagcgcatacggcgtatatgacgaattgaacagcgcctgtgcgtttaattggttgtggtagcttcccagcataattagccaaggaatcaaataaacaaccccgagaattctagatacaatgctaccaaacgatagccaaaatgaaccggataggatttttttattcaatagaatagcctcaaatctacgttagtttctcattgtgccttcttattatacgtggattttataactttgtgggaaatatgtaccaactagttacccttttttaacaaatttttcggctctaataatacaaatcagttacattatttactatattgttacccagcctttaattttacgttagaccccttgacctaaccttctttaattattatccttaaaatgtttctgttaaaggtcataattagacaaaaataataatgtattaagaatattcatcgggggaattaagttgtcattcaagaaaaagattatcactaaattagcttatgttgctatgctttcaactactggcgttgccgcagctgcaatcgtgcaaccacaagcacatgttcaagcttctaccacttcagttgctgctcgctcactcggaatcgatgttgctagttaccaaagtgctgatctttcagctcacgctaaaagcggtgctaagtttgctgttgttaaagtaagtgaaggtaccagctacagaaatcctaaggctagtgctcaaatcgctagtgcccgcgctaagaatatgatgccaatgggctaccactttgctacattttctgctaatagcgctgctgctaaaaatgaagccaactacgcaatcgcatcagctaaggctgttggtcttggtgctggctcataccttgcatgtgactatgagtcaggtgacggcaacaatatctatggtggtaagaatcctactgctaatgcaattaatgccttcatgagcaaggttaaagctgctggttacaagccacttctttacgctagttcatcagttttaagaaacaacattaacactaactctgttgttaacaaattccctaactcattatgggttgctgcatacgctgtttcaggtcgagtagacaatcctaactttgactacttcccatcaatgaagggtgtttcaatttggcaatttactgacaactggcgtggtcttaacgttgacggtaacattaacgttttacctcttacttcatcaggtagcgctgtttctcaagcacctaagaaggctcgcgtattaaagaagaaggctcatgtatataacaaggctggtcaccgtacaggcaagactattaagaagggcacttctatcactacccatggcaagaagaaaactatcaatggtaagaaatactacaagattgccaagaatcaatacattagatcagctaacctttactaaaaaggcaaaataagtcatcaaaaaatgcaccaggtagaaattacctgatgcattttattttatccaattttttacttggcgaattgttcaccagctaagttacggtagaagttagccttagcttgacggtaatatgggttaacccacaataaaccgatcccgcaggaaataataccaagtagccaccagccgatgaaacttaaatcaaaaataaacaagtccatcttatggccatccatcaacttacggctggcactgatagcttctgtggcagtcggctcatgaccactatctagcatgtcacgcaagatatatggtgtcactgcatatgaataagccttgatcagccctggaataatcagtaaccaagtccacaaaataagaaaaatttcatataaaatataagttaaaaagttactcttaaagtttctggtaaatggactaaagatacctgaaagaacattttccttagtaccactatctctaaaatgcaagatagtataaattacgccccatgtgattaagccaattgcaactgaaactaccaaagtaatcagccatgcaaaaggattaactcttactttatctaggtacatcaattcagcattgttaccgaagcggcggacaataccgtacacgatatcttcgcccttttcaaaaaagttttcgatatcggtcaaaatataaacgattagccagccaacaaatgacagcaaaactgcccagccccagttaccacgtaactggtctctagcttgttcttttaattcttttcttgtagtagccattttctctcctcctcacttttctaatcatgagtattgtcgcctaaaatcagggcagaatcaattaaaagcacatcaaaaaagcctaattccaccaacatcggaactaggctcacacagtgttgaccgccactctgaccacatatagaagataacattttcgctaccggagaaaatgactactaatagcgacggtacatgatagattttagcattcaactacctaaaagacaagcgaaaagacgtgttgaattagcggaatggataccaaaatttacggataaaaaagacgaggtctaaacctcgtcttcttcattactaaaattcaagcatcatcgtcattgcacgattgatcttctttttaatctttttaaactcaccagaagcagtatgattatcctgcaaaatgatcatgttctggccatctttagttgcccgcataaaggtataatacccttcaccagcaccattagcagctttataatgctttaaattataaagtccaccattataatagctaggagcctgacccttgaacagaacttttctactcttgttagtcaaaatcttaccagcaagaatatactgcatggtcttagctaaatctgcgttagacattacgattgaaccagcacccagctcattgtgagcatccttaacggctttagcatggttcactttgacatattcaccctcacgcatttcatagcctggtacccaatgactagccaataacttagccttgtctgaccacaagaactcactatgggttagcttcagtggcttgatatatgtgtcatggaacaattgctcgtatgactttttctcaagcttggacaagattccacaaaggaaaatatagtttactgaagtatagtgccacttacctaatttgctagcatcaaacacagtatattgtgcatcatgcttgatgttcgcttcatcagagataaactcaggcgtacctaattgttgaccagctttcaaatccagccctgatgtcatatcaattaagttgctaatcttgactgaactagcaccatctacatttgggtagaattttgaaagtttatcgctaagcttcaactttcctttctctacctcatgcatcaccattgcagctgtcattgacttttgaactgaattgatcaaatagctagtgtcaggtttattgtccgtcgcataattaagcaaaactttgccatgatttattactaaaactgagcctttaacgcccacatggtcaatagcctggcgcactattccgcttttaaacggtctttattgcttaaatcaactcgtttaacgttatccttgttttgccacttcttggagtagaagtagttagacatatcatagtcataacgcttattaggttccttcatgaatggacgaacagcttgatcaactgcaacccagcctttccagcctaggtgaatagtatcttgcataaagtacttttcattgcctcgtcttgaaagatctgcaatattttcaaagccttgactggttaactggtgttccatcttagcaacagactcttggtacatcttgctagataaaccagtgtacttcatccacttgccattaattggtgggatgataaatagcacattagtgtgttgcttagcaaactgctccaacatcaattggaaatcaccatattctactgaatgtacatagtcaaaatcacgctgactacccttcaagcgtttcaataccttctttggtaaacgtgttctaaagaaggtattatcaatacctaagttgtttgagttagtgtgtatagcagcttgctctgctgcaaccttattcaaagcagctacagaatacttgttaggtaaaaccttagctctcttttgaatcttatttacacgatcacgcaattggaatgagctgaagaaattatcttcgttacgcaacattcgacgacgattttgtaaataaaatttttggaagctagtcaacttcttgccttgagcaatttgcttaaggctattcttgatctcgccctttacatttggcatttccaacagacgtttagctgcataacgatcagttttattattcttggcactaagcaagaaattacatgcttgcaatggtgaataatacaatgcaaaggcattaggatcttgaccccgcttagtaaaccattgtggtgaaatgatcacaacagccttcttgtttctaagctgcttagctgttccttgcatccccaagaactgagccaaagattgactacccggtccacctaataagaatggacggtagtttctatgatacttttccgcaattacactagggtgaagtgggtcgaatcttgacaactcacttgaaccatagaatggcacgtagccatcttcaaaagcttcctgcttcattgtgctgcccttgaagacagttgtgttttgtgaagctgcagcctcgtaaatcgtttgcttagaaaaagttctttcccaaggaataaggaaaacaactaacaaaaggataaaagcgcaaagaactgggccaaagatttgccacagccggcgtttattactcattttctaagctttccacctttgccacaatcttgtttggagtgtcccattcttcacggttaaattctgaaacaggaacatcaatatcaaacttttcttgcaagttcaaaagcatttgtacacttgccattgagtccatcaaaccattgtcaaagatgttttcatccatttggtctgataaatcttcaccagttaagtcatttaaaatatctaatacgccttgttttgtatccataattaatacctctcaaaaaacaactcaatacttattctacttccagccgaaccacagttgacttaggaaccctgagaaaatcaagaaactgaaacatactacattgaaggttaagaaaatggcgaaccatttagtaaacttgttagatggaatttgcttcttatgctttctcttgaatctaagccacatatcgttgatacaaatagctgaagcatggaagataccataaacaatataataccacgttaagccatgccagaaacccatgattaagaacaacaggaagtaagaaacttgtgataatctaattcgattcttaaacattttcttcttcattgcaaagaaagtgaatcgcatgtagatgtaatcacggaaccagaatgataaagtaatgtgccaacggttccaaaaatccttaatgttcttagaaataaatggcttgttaaagttcattggtgtatgaattcccataaagtatgagattgatacagcaaacaatgagtaacctgcaaagtcaaagaacaggtacatactgtagcaatacatgtaagctacaagccaccatgatagcttcaagccgccatttgcattaccaacggctaaagcagcagcactgatctttggtaacaaataagtgccaaagaaccaaccaatcacaaatttgtataaaaagccttggaataagtatctaacagcatactgcatatctgtaatgtatgcatcacgcgtaggtaccttatcataatcttttttaaatctgcggtaacgatcaataggacctgacgaaatagttgggaagaaaagcaagaatcttgcgtaagtaacaggatctactttcttaattgccccatcacgcatttccataataacttgtactgtcttaaaggttacgtatgagattcccaagaaaccaatgacaaagccaattgagttatcaggaaaagcggtcaaatatttaactgcggctaatggaataattgccaaaatcacagccaaactaaagatccaagtcttatttttaccgtggtgacgataatactgataagcaaaggttaaggcaaattcgtaaaccaaccagattaataggttaaccccttgctcccagtgatcaccatcaaaaatcaagaacaagaaaacaattgaaaaaattgcttcatatgtcttgagtcgatgaccgtaatatagcccaatgataattggaattaaagcgatcatcaaatagatgaaatattgcggattagaataaggctgtaagttaatgaaattaaaattcactacttattaacctccttaattaccgccttaatatctaccttaccattttgtgaaataggtaatgcatcttggtagatgtaacgctgtggaatcatgtaaggcattatattcttagctaagtcttcacgaatcatcttagttaaagcagcttcagaatactgacgacgaacgccttcttttaattcgatttcggcaacgatctgcttaacagtgtggtccttattgtacttaggagcagcaacgccataacggacaagcttgttcttagttaagtagaaattgatttcttcaagttcgattctgtaaccattgaacttgatttggaagtcaattcgaccgcgataaaatagcatatcgccatcaaagaaaccagcatccccactccggtagctacgatactcagcaccatcttcatggaaaaaggcagcttcggtcttttcaggattgttcatatatcctttagaaacactaggaccactaatgataatttcaccttcgccaggcttatcacccttagaagtatcaattgtaatcttagtgtcttcttttaccttaccgattggcaaacggtcatactttttaagaacttcatcagtaatttcaacttgagtaacagcaactgttgtttcagttggaccataggtgttgaaaatatgactatctgggaacttcttcttaagcatctcagcttcactgtgtggcaattcttcaccacagaacaagaaatgacttaagtctggatggtgttctgcatcaaaagtcttgtccaagaagcacatctgtgcaaatgacggagttgatacccaaacattgaactgcatctttggcaaagtttggaataatttaccaaagttttgagtaacatcatgaggcaaaactaccaacttaccagcagaaacaagtgctggataaagactcattactgacaaatcaaatgagtaaggtgcttgtgccaagaaacttggatgttctggcaaattaaagtctgacaactcccagttaacgaaactaagcaaattgtcgtgactaatttgtacacccttaggtttaccagttgtacctgaagtaaagataatgtagtagttctcatcaccttcaacgaagttcttctcgtcaacttcaaaattgtcgtcttcaacttcgctagccttaagaaccttaacatcagttaaatcaacttctggtaacggatcaatttccaaaactagtggtgacttagaaacgtcttgaatcatcgttaaacgttctgcgttagaatagctagcaattggaatataagcgtgacctgacttaacacaaccaagaaaactagcaatcatttcaaaagtttgtccgccccaaatcataattggagcatgctctggaatatctaagctagcaattttatgtgcccacgcatttgaacgctttttaaggtcaccatatgtattagtttcaccgagatagtcgtaaacaacacgatctggttcgtttgcggcgatctcatcaattttcttaataacatcttgaatcatgtgatagcacctaccttaaaattcattataaatgaagtgaacagatgttagtccactatattcatataaatagataagagccatcaggattccgaaataaacaattgttttcaaaacaaacataccaatacgtctgcctcgagaatcaaccttcgtctttttattcattttttctcctttaggtaatcttacttttgcctttgccctatattactacaaatagtggcaacaaacgcactaacggcttatattttaacaaatttaaactttttcttaaatcttcagttatttgtttcaaattgcgaatgcgttttctttactgttgtctcttgcaatcccgataagcaaaaaataatggaataaagataactattgccacaaaaatcaaagcaaagatcattaagcgccatacattctgtggtttagtccacattttactctttgccgtcgccaacaaaaatgccgcaaataaagcaataacaattacttcaaccaggcaaaaaattaaatgagtattttgccagagatataagtaggttgttgccggaaataaacaaaaccaccctgaaaagcgtaaaagaaagatttcttttttacgataatctactttcattatagtttcctttcctcattaactgccaaataacgcattaatattcaccgacaaaatccggtccataactacaatttctggtctggcgtagatcttagagcctgattcaaacacacatagtagttgtcccttataagcggtaatttgctctaaatatggcggcatggtaattaccagttctgcattcttttcgtctaaagcatttaaagctgaagttggaaaaacgtagagcttggaatcaccactaccataagattggctcaaaaaaattttattttggtaaattgcaattccttgaatttgcttatccattgaagtttcgccagttggatcggaccattgcagcgttccggtaacagatttaacttcattattagtaattgagccacgatttttaccactacgcgctatagtgtaagccgcaacttttcctcgaccatacatgttaaaaaagccaacaaacaattgaccatcataatatgtaacggtcgatgctttttcaactgcaggaatggcaatttgatatttatacttaattggtatttggctgccctctttataggcccttaattctgccattgaaaatgctgctagcgctgaagatttgcccattgagccagttatccagatatttttggctactggatcataagcaatcccacctaggtgtggccgaccaggtatttgaatcgttttaagatatttgcctgtcttcttatctaagacataaacaaccgaagcatgctcatgttcaccatcataagcagttagcaaaatatacttacctgcaaccgtaatcccctgtggtgtcattgcagttgctgtattgacctttttagttttaaaatcataacttttagtagcaactaatcccggcaaaacaaagtcttttccatcccacgtccgcggtggtacataattggcaactttattaataaaaggatatttttcacgcaatgctttttggtaattggcaaaattatgccaagcaggactagtgcttgtcccatccttagcaattttttcttttggccgttgacggatcatctcctgcttctgccaccattggtaaccgaaatagcctcctgcaccaatccctgcaagcaaaagcagtactagcaggaagcgcaaaattcttttaccaatttttttcaaaaaattactcccttctgtttaggaattgtccctattatgcaattcattataacgaaaaaacaattactttttgtttttaactccttgctataagctttatttactaaaaagataaatttttttgcaaaaaagtgctttcgtcacacttttttcacaaattaaggttatactagtaaatgtagtgaggaagaataatcctctactacaactcaacttttttgtttttcattcatactcctccaagtaaataatgaaaataaaaagaattgacttactccaattagtcaatttcatatctatccctttcggctcacgtgcgttgcgtgagcttttcttataccttaacttattctcaagcaaatctttaccttttcataataaattgaacacttttacttcacatttacccagtattatataaaccgtagcaagatggtagaaacttgctacaatactcccacttttttatttcattcattcttactcctccaaagtagatgaaactaataaggtccgcaaaaacttgcgggccttttcctttttcagcacttttttctgtataattaaggtagaaatgaggtgccgctatgttttcaccatcaatcaaacatttaatagaagaaaaatctggttcatttttaatccctgctagccgaattgcctttgtccaagcagacaatcctctttatcatgcctttttgattttgactaaggttaaatattcaaaaattccagttttagataaagaaaaacgagtcgttggcctgcttagtttggaaatgattacggacaagatgctgacgactgatgagatctccactgcccctttagataaattaaaggtcgaagatgtaatgcaaactaagtttgataaaataaacttcgttgaaaccaccctagaaacgcaactgcatctgttaatcaataatgctttcttgcccgttgttgatgatcgcggcgtgtttcagggactacttactagacgcgaatggattaaggcatttaactatgtagttcacacttatgacaaacactacgaaacaaaacgaataaaataacctccaagcagcctttaaggctgctttttttaactccaacatttattgagcaaaaatgtgtccagaccaataaagaatgttagaattaagcggtagacagatatgtttgtattttggggagggcaattatgaaaaatttaaaacgtcaatggaagtttattgtcgttttgattactggtgcagttggattaattagccaatttgcattgcattcaaagagcctattctcaatcgggaatcttcaatttccagttcatgccatcattattgatatcattggtatcttgatggcaatttctttactattggaaattttccacgattggaagacaggccgttacggcgtagacatcctggctgttatcgctgttgtttctaccatattgattggtgatgtatgggctgaatggatgattttggtaatgatgaccggtggtgaaacgctggaagattacgcaattggtcaagccaacaaggaattacgtgccttgcttgataaaacgccacgtatcgccaacaagttagttgacgggaagatcaccgaagttaaggttgatgacctgcaggtcggtgatactgttttgatcaagccaggtcaacaagttcctgtcgatggtcaaatcgttaagggcacttcaagcttcgaccaatcttcattaactggtgaatcagttcctgtgaccaagaaccctggcgacgaattaatgtccggttcagtgaacggtgatgtagcggtagagatgaaggtaactaaggctgctaaggactcagaatatcagtctattgttgcgttagttaagtcttcacaagctcaacctgctaagttcgttaagatggctgaccgttacgccattccgtttaccgttatatctttaattattggtggtgtcgcttgggctgtgtctggggatgcaactcgctttgcggaagttatggttgttgcttctccatgtccactgttgatcgctgctcctgttgctttggtatcagggatgagttcaatgtcagctcaccatattattgttaagtctggtccaaccctagagaagttggctcgcgctaagacctttgcttttgataagactggtactttgactgaaaaccaattgatcgttgaccaagtcgttactgatgacaaatcatttgatcaaaaagaattgcaaagcttagctgccagtgttgaacaacagtcaagtcacgttatcgctagttctctagttaaggctactgacaaggatttaattcatcccgtaactaaccttaaggaaactaccgctcaaggtgttgaaggtgatgttgatggcaaacacgttaaagttggtaagttatcctttgttgcgccaggtcatgaaaaattaaacgtcacttcaactgctgtttacgtttcagttgacggtaagtttgctggttacatcactttgaaagataagatgcgtccagagagttctaagactattgaacgtcttcgtcgtcaaggtgcagaagatatcatgatgcttaccggtgaccacaagcaagtcgcagaaaaggttgccaaagaagccggcattactgatgtccgctcagaacttttgccatcacaaaagattcaagctattaaagatgtgccaaagcacctacgtcctgtcgttatgactggtgatggtgttaacgatgcacctagtctgaccgctgctgatgttggtattgctatgggtgctaagggtgctaagggtgctaagggtgctatgggtgctatgggtgctactgctgccagtgaaagtgccgatgctgttatcatggttaacgatatttctaaagttaacgatgcagtcgctatttctaaacacacaatgaaggttgctaatatcgatgttttaactgcaattggtgtcgttattatcattgaattgattgccttcactggtgttatcccagccttctggggcgctattttgcaagaagtagtcgacatgattacgatcagcttaggtttacttgctaagactaagccaagtgataagcaatttggtttggaagaaaaatagattagatgtgaagaagctccagaatcgatttggttctggagccttttttcatacataattatgcgtagcactgcaccagttcaatttgcatctaagttaaaaaactattaagattaaactcaactaaataatttttagtggttgggtttttatcacaataaaaactttcaagattcgcttctttgggtcaggaagcacttgaaagttttttgtttttttacagaaggggaaaatatgcattttttaggacaacttgtcttaatcctcttaactacagttttgctggggcaattattcgcccgcttcaatatgcctgcagttattggacaactattatcaggaattttactgggaccagctatcttaaattgggttaagccaaatgatatcatcagtctattctccgagttcggggttattctgctgatgttcttagctgggcttgagagcgatctagatttattaaaaaaatacttcaagctaagctttactgtcgccacagtcggcgttatcctacccgttgttttcatgggcttagccagttacttctttggcatgcgccctcttgaagcactctttatcgggattgtctttgcagcaactagcgtttctatctccgttgtggtgctgcaagaagcacaccaactgcacacccgtgccggcacagccattttaggtgctgccgtagttgacgatatcttagccgtggttgttctgagtctattcactacattcagtcatgaaggtggcaagagcggcttaactaataactttttgcttaatatcttgattgaagtagtttacttcgtagttgtttggctgatttttaaatttgttgcgccatactttatgaaagcttctgaaaaaatcgacgttgactattccgtcgttatcggttcattggttttagccttaaccatggcttgggccgctgattttgttggtctttcagctgttgttggtgcatttttcggtggtttagcaattcgtcaaacaccacaatacaaagaagttcactcctctgtttccgcaatcggctactctgtcttcatccccgtcttcttcgctgatatcggtctttcaatgacttttgccagctttttcaaggatatctggttcattatcgttatgaccgttttagctattttatcaaaattctgggccggaaaatactccagcgaaatctttggcttcaataagaatgaaggcaatatcgtcggtgctggaatggtatcacgtggtgaagttgcactgattgtagcgcaaatcggaattaaccaccatctcttccctgaggatatttattcaagtctgatcctagtaattatcgttacaacagttatttcaccatttattttgaattactttattaaaaagagtcaaaatagtacggaatttatgtagaaaaagtctagcattcgctagattttttaatagtttaattttacaagtggcttatcataaacgcaattgtgtctacatggtaaaatcaatagtgagaggtgagaaatatgttacaaactccaaacaatattagagctgttaccgctcgtgacctgcgcaataattttaagaaaattgctgatgatattaatgactatgatactaccgttatagtagctcgtcccaaagataaaaatgttgtgattatttctcaaaaagaatatgattcatggcaagaaacttcatatcttctaggaactaaagctaaccgcgatgcattagctgaagctaaacaatcatttgaaaaccaagatcaacgaaataaagttttaaccccagaagaattcgaggctttaactaaagatgacgaagcttaaccttaattttaactacaatgcctggaatgaatatcttgaatggaaaaaagaggataagaagacttcccaaaagattgataattttattaaagaatgccaacgccatccttttactggaaaagggaaacctgagccattaaaagcgaatttaagtggtgcatggtctcgacaaagtaatcataaagatcgcatggtttattcagttaccacaacagaattacaaatatggcagttaaaataccattattccaaatgaaaaagctctttcgagcttttttgtttaacccaattttcctaaatcgattacttggtcatacttctgcaactcatttgattcatagtggtgaattacttcaataaaggtaaggtttgagtttaacaagtaattatgaatttgatctgatgtcttcttatcaagggatgcattaatttcatctagtagcaaaatcgatctatcggccaaaattgcccgtgctagttctattctagctagctgtcccccagacaattgatccgcattatcacccaaggaatagtcccagcccttttcagcaataatttgatccaaacctaatttttggcacacctcgctcaccttttcccgggaaatatttgcacctaaagttaaattaaaccacaaggtatcggcaaaaattactggggactggctagcataagcgaataaatctgtaaacgagcctggcttttgctttttgtcgttaagcaatatttccttggcatgaccatgctttccggttaataggaattgtaataacgttgatttacctacaccagatggtccaataactgcaactttttgaccttttacaactgcaaagttaatttgattagctaattccttgccttttctagtaagatccagatcttctatttgcaaatttgcaaaattataattggtctctttcttttcaaccttgcccttggcaatatatttttctgccttagcgacaattttcttagttgttgataatttgtttcgatcttctaaaatagtcaaaattggattaagaaatgaatttgacagttgaacgattgcaaataaggcacctaaagtagtttgacccttaaccaccatgtaaattcccactaagaatggggttaagaacgtaaataaactagcaatcaagttaatccaagaattagtatctagattgagtaagttcattttacgcaaagcatcttctaattgattgatcaaaacttgatttttcttaaccgcattatcgcgcttgttgtataaatttaatgttgtgctaccagccagaaagtttttaatatgactaacatatttatcattagcagttgtccaattttctgctgcagtttgaatcttcttttgaaataaattagaaaccagcatcggcaaacatgaaccgattaaaaataataatgtaactaaccaattaacacataaagcataccctagcgcaaaaacaatcatataggcctgcatcattatttcaatttcagcatcaaaacgattagtttccagcagcttaaaatctgtagtcaaaaagcctaagctagcagtattttcttcgctagtctgacccagcatcccctttaaaatgccagctcgcagcgtcgtattagtctcttgaatagcacttgtttttaaccgattgaaaatcagcgaagcaataaaagtcgcaataaacgccccaataacaataactagaaattgtgctaaatcgccaaaccttctttgcgtaccaacattggtcaatgtctgtaccatatatgcaaaaatgatttgttgtgtactagcaatcaagcctaaaatagttaacataatgaattttgcatgtgaagaatatttgtaaatcattttttgtcctcctgtattttacttgaggctagtatcgcaggataatgacgaaaaatgttagaaatttacagatctgcaaatcgaggtaaaacattatgttcaaatatggttcaatttacaaacaattgcgcaaagatcaagaaatcactcaaactgaagcctgcaagggtatttgttcaatctctaagttatcacgctgggaaaataatcaggtagaagttgagtttagcaccgccattgcattactcaggcgcatcaacattacgcttgacgaattcacgcattacgctgcaatgaaaacagaatttacattgccagacgacattataacggccattaaagacaatgatacaaaggtactcgaaaaatttgttcaggagcagctaaatcattatcacgccaacaaaaatattctcgaactcaaaaacatcattcttgtctgcaatcaattatttctcatgactggtaaaaactatctaacacctgcagacattaatcgaatcggttcatacctgcttcacaacaccgtttggtctaaatacaatatcttgctttttgctaactcaccgtttttgctaaattctaaaatcggctatcaaattgctctgcgaattattcacaattttcaccctacagaaagtttaaacgaaaatactactattttcatgggcggtttatctgatacagttattgccttagttttcaaaaagaagctagattacgctcaaaaaattcttaatgaattaaaaaagataggacttcccttctatctcatgttctttagttcaacattgacccttttacaaaaaattatcgactactgccacactctcaacgcacagcctgtattggcaatgattgatgccatagttcagctaaattgcatggaagttgctaaaaaatggcttgagatttttaaagacgtacaacaaatctggccagaaaaagaaaattaaaaaccgtaaaagtaatttactttcacggcttttgacatggtattcattatgcaagcttacaaatttttagcttttaattaatccttaacaacgtctttggtgttcaaccattgactcttgttgatcttaacgatcttcttgccagcagctttcttaacatccttagcggtgtaagttgaacccattgaaaccttttggctagtcttgtgaccttgtgcgtccaaaacattaactttttggttcttagtgtcctttacagcaacaaagatcttgtcaccctttttaattgcaggatcagttggcatagtttcggcaacacctaactttggagcagtaaaactagctgcttgactaactgaagcaccaacacccattaaactcattgaagcaactgcgattgaaacaactttaactaaattctttgaaactaacataatgaatacctctaatttctatatcacttaatttgttggaactttttgttccctcattccttacgtctttattgtataacatatgttattaattacaagggggtttatcgaattttttaaaaataattcagtcgtctcaaagtattgctataataacgattgcggggattttttgtccaaaagcattaaaaaagtgtctgagaaaccgttctttcccaaacacttttttaagcagctgctacttcgtttgaattttgagtcacttttctagtttttaaactgacaaaaatcgctacaattagtgttattacctggattactaataatgtaaccaaagcaacagtaacattgaatgaaccagaaattgtggttaatactgttgtcataattggagcaacagccattaagattgtatttaataagccaacagttgaagccaagattttatgatcaactgatgttactagccattgctccattttaactgaagcaactcctgcaatagctgccaagaaaaacattgttatcataattacgtaagtatttcctaggaaaatgcttgttgtagtaacaatacttaaactggcagaaataattactaaactaaaaactgttaattttttgaataattgtggtccaaacattgaacccaatgcaaagcctgcgccaataaccacaccaaacaaagcaatagtaaagctataagtgccgattagcatagttgaacgatgagctgcaagtacaattgttgtcaatggagtaattgtatctaaagctccatttaataatgcgattactaataccacagtcaataatcctgattgtttcttcacttgggtcaatgaagttttcattgtttggaaaaagttttgatcattaacttcctttttttcaagtggcttctgatccttctgatgttttaagccaacactggcaaataacaaacctgctaacaagaaagtacctgcattaacaaaggctaaagttgagtatgacattactagcaaaagtgctgaaccaatgaattgagcacccatactaataatttgatttacgccgccattaaagcctactgcattcccgtattcttttttaccaacaatatcaacaattaatggtgcaaccaagccacctgaatatgaaccaatagtatctgataagaaattcacaacaacgatgattaaaaccaaattccactgtgacattttagtgataaacaataatcctactaaaccatataagataaatcggacaaatgctgctaaaaagatattgcgaaactttttcttagtcttatcagcaaggtaaccaccaaagatctcgaataattttggaactgattcagaaattgcaattaatgaaagtgctaatgagtagttttgtaatttgctagcataagtcatgaaagccaagtagaaaagaatatcgcctgcgcctgaaagaaaactagctactgaaaatcttctaaagtctgcgtttttaagaaatacgttcataaatcttacccctttttctttgtttcgtttgttgttgaaattataataaagtgaaaaagaaattaattttaaaaatggcgtattcgacattcggaggataaacctatgacaattggtgaattactcaaagaaaaaagactagcagaaaacaaaactcaaaaagcatgggttggtcatattatcagtacttcttattatgctaaagttgaaaagaatattcatagaattacagcagaggatttattagccattcttaaacataatgatctttcaattactgactttttcgaagaattagcagacaaaaaggatgaactaaaagcacaagtaaactcgctaaataaaacagtaattgatgctgtttatcattctgatgtttccaaagttaatgaagtcattcaaattattaaaaaaatggatctaccgactaagcaaaaacaagaacttatcttaatcaataaggggtttatcgaaactatcaaaaatgatctaagtgacaattatcagccagataaaaacatcgttcaacaactaaaagacaaaatttttagtattcctaattttaatagattcaaacttgaactctatactaatttcatgcaattttatgattatacaactaatattatgatcaccaaacaagtgatccataaaatagatcagtttaagagcgataaagagttattagcaatcgctggtattctattcaatctcctttcacaattagtcgaagaacatcattatcaagaaactgcaccatttatagcagctagtgagcatttaccctttttaccagacttatactttcctcaaaccggaatctcattgctaaaataccttattagttatcattttaataaaaaaacagcagacttagctaaagctgagatgattgcacaaacttatcaaattactggtctagaagactttggtaaaggtgcacaagaaattattaatgaagttaaagaggactagctttaagctaatcctcttgtttcaatctctaaataaaacctaacgcgttatagcacatgtgcaccaaaattgaatagcgcaaatctttggttgacatatagacccaagctaaaaccatgcctaagacccaatatactaagatatacttacttaatgccggatcatgcatatagccaaataaaaatccgcttgcaacaatacctagccacttatttctagtatttttcttagtgaaaaagatattgaaaaacatccctctaaagatatgttcctcacaaaatggcgcgatgaaaactactaggatcctaaataaacctgcattgtattccgctattttattcaagctttcctggttctttgaaacgccgccaccaactagattaagcatcacaatcgaacctactacaatcagtacaaaaccgatcatcgctattccgattctgcgccagtcccagtgtggtgtttcatcaaagccccaatcattttcttcttttaattgcctgcgataaatataggaaattgcaaacaaaactattaccgtagcaagcgccgtaacgaagacgcgatattgcgccaaatcaaatcgctgaggtctaaagtaaagtacttctaattcagaataaattaccaaagccaacacagcccctgcaatatttcccaggtaatgtccaaatctcttcatttttcattcacaccttgattctttcaactagtaatcattgtttctattataatgtaaataagaaaaaatacctaaggaggagtatctatctatgcttaatcagatcatcgcttttttggggagacgcggtgagttcttctacatttcagtctttatgttactgatattttttgcctttttaatctcttggcttatcgaaccaagacgtttgattaatggcgttttgtttactatctttatagtctcaatgctctcttggatcaccgttatggtgcacaaaagtacgagtcacggcttgcaacgtgcctatgacctactagttctagctgcattatttggcattgtcttattattaattttcgcctggatttttctattctggaatgcctatttcgtttggaaatatgaaagccatactttgcctaacttgcttactttaattaccggatttttagcattaattattagtattatcgtgctcttaggaccaggtaagtacttgccacgttggcttagtctcgcattagcttcaattcccgcgattgcaatttatttgggattggtgctttacaactttttggtaaacttgcttctatatcaaatttatcctcgtacctaccaccaagactatttaatcgttctagggtctgggctaatcaatggcgaccaagtatcaaaactgcttgcggctagaattaatcgggcaattcaatactctaaccgccagtatcaaaagggccgcaagcgccctatcctgatcatgtcaggtggtcaaggcgctgacgaaaaaatctctgaagcactcgctatgtctcgttttgcacaacggcgtggcgttagtgttgaccgtatcttattagaagatcaatcgaaaaacacatacgaaaacatgctcttttctaagcgtattgccacaaaagattttggtaattcccacttcagggcacgcttctttagcaataattaccatatttttagagctgctctcttggctaaggaagttggtttaaaagccaatggtgtcggtgcttacaccagattctactacttgcctaacgcaattatccgcgaatttgccggtgtgtttgtcatgcataaacgccgtcatttcgttatcatgggattaatcgttttattctttatcctgcaagctatcttagtcatgacaggattagaaagatttactgtaatttagaaaagagggatgcaatgcttcaactaaagcatatttttaagtcatataaggtgggggacaacatcacccacgctttagacgacgttacaatctcgttccgtgaccaggaattcgtcgctatcttaggtcctagtggttctggaaaaactaccatgttaaacgtaattggcggacttgaccgttacgaccaaggtgacttgatcatcaacggcaaatctaccaagaattttaaagagaccgactgggatgcttaccgcaacaataccgttggttttgtttttcaaaattataatctaatcccccacttgtcgatcatcgccaatgtggaactagggatgaatttgtctggtgtgcctaaaaaacagcgccatgaaaaagcaattgcggcgttaacagaagtgggattgaaagaccatctaaataaacgtcctaaccagttgtctggcggtcagatgcaacgagtagcgattgctcgagcaattgccaacgaccctgatattctactttgtgatgaaccaactggtgcacttgatactgagacttctgtccaaattatgaagttgatcaaaaaactatctaaagatcgactcgttattatggtgacccacaatcctgaattagctaaagaatacgccacaagaatcgttaatttccaagacggtaagattcgtcatgattctgatccttttagccctaataaggaagaagacaaatttaacctcaagcgtaccaagatgtcttactggaacgccatcaagttgagtttcaccaatattatgacaaaaaaaggtcgaactctgctaactgcttttgcttcaagcatcgggattatctcaattgccgtagttttagctatctctaatggttttcaaaagcaaatcaataccacaatgagcaaagctttagcaaaatatccgatttctatttcacagaccgcaactgacattacttcagctaatgcacgtaaagaatcggataaaaatgtcaaaaaccgcggctatgtaacggcagaacaagaccaaagcgaacaggcccaacacgttaataaaattagcacaaagtatgttaactacatcaagaagatcaatcctaattatgccaataacgtgtcttaccaacgcggcgtaagcttgaatttattagctaaaaacaagggaaaaattgaacgcgtgcaattttcaaatacggatcctgatcagactaattctgttctagctgctagatcccaagcgatgagttcaatgggactgggttcaagtgtctttcccactactttaaataaagagaaagactcatttttgaagcaaaactatcaattgctctcaggcacttggcctactaaggcaaccgacttggttttagttactgacaataaaaatactgttaacatcaatgccttaaaaaatcttggtttcgatttaaagaataaggaacacgtcaaattcggccaattagtaaataagcaatttcgtgtagttgctaacaatgattactatcagcaattgccaactggcatgtttattcctaaaaaggtaaataacgccatgtataacggtgctcaaaccaagctaaagattgctggtgtcattcgtcctaaaaacgaagattcaatggccttgttatcaactggaattgcttatagcgatcaactttcacaacgcgtgattaatgaaaataaaaactctgcaattgtaaaggcacaaaagaagagtaaccatagcgtattaactaaccaaaaactaaatgccaatgaaaagaaagctacaatgcagactcttggcggtaccagcatccctactggtatcatgatttatcccaacaattttgatgataaagataaagtacttgattatcttgacaaatggaacaaggggaagaaaaaatcagacaagattctctatactgacatgtcaaacgctgttaccacaatgactagcggcctcttaagcgggataacgaccatccttgtcgcatttgctggtatttcattaatcacatctatgattatgattggtattttaacttatacctcagtacttgagcgaactaaagaaatcggggtactcaaggcattaggtgcccgtaaaaaagacattactcgtgtctttgatgccgaaaccttcatcctaggtgttttctctggtgtattaggcattctgattgcttacctactaacattcccaattaacagtatcatttacaagattactgatctggcaaatgtagcccaactagatcctactgctgctattgttttgatcattatttcaactatcctcaccctcttaggtggtcatattccagcacgaatggctgcaaagaaagatgctgcaattgcattgcggagtgaatgaatttaataaagaatttgttacgttgttcacaataacctaaatttttagcaaaatatgtggtatcttagctttagcaaaaacaagtaagaaaggaacttttttcaccatgactgttaaaaaattagaaaataacagcgatgttaatgtagtggcagaagaaagcaaagttttaactgatttattgaatgaatcaactaagcaagtaatcggtcaagcagctttcgataagatccaaaacttaattaaaatctctgccgccaaagattatcaagaacttgaaaagcaaattgctagtcttaacaatcgcgaaatgattgttgttgcacgttattttgctactctcccactcttgatcaacatttcagaggatgtagaactagcaagtaaagttaatgtgcttaacaatactcatcaagattatctaggtaaattgagtgacacaattgacattgtagcccaaaagaaaaatgccgaagaaatccttgaacatgtaaatgtagtacccgttttaactgcccatcctactcaggtacaaagaaaaaccattttggaattaaccgatcaaattcatcaacttttgcgcaattatcgtgatgtgaagaatggcacaattgatcgcgatgaatggactgaacaaatgcgggcttgcattgaaattttgatgcaaactgacattattcgtggtcacaaattaaaggtagctaatgaaattaccaatgttttggcttactaccctaaggctttaatccctgcaatcaccaaatttactagtcgttacaaggaattagctaaaaaacacgggctaaacgctagtcatgctacgccaattaccatgggaatgtggatcggcggcgaccgtgacggtaacccttatgtaacggctgatacgctagaactaagcgctactttgcaaagccaagtaatctttgaatattacattaagcaaatcaataagctttatagagccatttccatgtctacttcttatatggagccatctgacgatgtaatgcacctatctgagctttctaatgatgattcaccattcagaactaacgagccatatagacgggcattctactatattcaaagccgtttagtgcacactgaacaaaaattactgaatattactaacaagaacactttcttaaagaaacgtgacctccaaaatcttgataaaatcccttgttatcaaaatgctcaagaatttaaagccgacttagaaatcatcaaaaattcacttgaagaagaccatgatcacgccgtagtagacagctactttactcaaattcttgaggctatcaacatcttcggcttccatctagctacaattgatatgcgtcaagattctagcgttaacgaggcctgtgtcgctgagctacttaagagtgctggaatttgtgacaattatagcgatttaagcgaagacaaaaagatcaagcttttactcaacgaattgaacaatgatccacgtaacttacacgccaataacaaacccaagtctgagttactacaaaaagaattaaagatctacaagactgctcgtcaattgaaagaccgtttgggtgaagacgtcatcaagcaacatattatttctcacactgagagtgtttcagacatgctagaacaagcaatcatgttaaaggaatacgatttacttgataatcaaaaagcccgaattcaagtggtaccactatttgaaacggttgaagacttgaataatgcccgggaaataattaaggaattcttaagctttgatatcgtcaagaagtggcttgtttctcaaaataattatcaagaagttatgttaggctactcagattccaataaggacggtggctacttagcttcatgctggaacctttataaagctcaaaaggatctaactaagattggtgaagaaatgggtatcaagattacctttatgcatggccgtggcggtaccgttggtcgtggtggtagtccatcatacgaagcaattacagcacagccattcaagtcaattaacgatcggatgcggatgaccgagcaaggtgaaattatccaaaacaagtatggtaataaagacaccgcctactacaacctagaaatgttagcttcagcaacaatcgatcgaatggcttctaagcaaattgttagcgaagatcatgtcgcagatttccgttcttcaatggatcaaatcgtagctaaaagcaacgaagtttaccggaaactagtatttgagaatcctaacttccttaagtacttcttccaagcaactccaatcaaagaaatctctggtcttaacgtaggttcacgtccagcttcaagaaagaaactcactgacttttctggcttaagagccatcccttgggttttctcttggtcacaaagccgtgtaatgttccctggttggtatggcgtaggttctggtttcaagtcatttatcgatgctgatccagccaacttgaaggaattacaaaatatgtaccaaggttggccattcttccactccctgctttccaatgttgatatggttttacctaaatcaaatatgagaattgccaagcagtatgcggatctttgcgaagatgaacaagttaaatcagtctttgatatcatcaatcaagaatgggaactaactaagaaagtcatcctacaaattgaaggtcatgatgaattaatcgaagatgcacctactcttaagaagagtctggaatacagaatgccttacttcaacattttgaactacatccaattagaaatgatcaagcgtgatcgtgaagatgtgattcaaggtgtttaccaaagtattattccaattactatcaacggtgtggcttccggtttacgtaattcaggataaaaaacacataaaattcagctaaaaaaggctcctcattgcctgttttatcaagcatttgaggagcttttttttaatttattaaactttttagttacgcctttttcataactaagttaagtggcgttacaattactggaacgacaatggctgtaaaaattgcttctactaaaccgttcatgcccagtgccataattaaaattaaaatcaatggcgtacctgaactataatttcctaggtaatgagttaagcttgctggatcatgcatgaagaaaatactcgtcagcaaaataaccatcacggtattagttaacgaagtgactgctccacttatgatataacccaatttcgcatatttagtcttactcatacccttcgcaataattcccgggaaatagccagccaaaatacttggtaccaatgaaattaccggattttggaacaacattaagctgaccatatcgccaggttgagtatatgcaacaatcaatctggtaataccccagaataagccaaagcctagacccgccttttgtcccattaacgtgccatagacggcaattgtcattggaatagtagttacagctggcaaagccgggataattcttacatagccaacatttggcacaaaagtctgtacaatcaataaagcagcaaagacagcagtaattgctaatcttttagtttcttctcttctcatatatttctccaacttaattctttagactcaattaaaccataattaagattttttctcagcaaaaaagtttattatacaatatctaggtatattttatctagagactgtaaaatagtttgtgtaaggatgaatgattccttaaatttatttctttaaacattagaaaaaggagttcctttctcgtatgattggtttgaacaaaaaaacacatacagaaagaagaactccttcatgaatgattttaccaaagattttgctcaagctctattcaatccagacaaaataaatgatttattgcgcaaagagctacaacaggctgttaataacttgttagaagctgaattgactgcctttctgggctatgatccctatgccagaaatggctggaatactggcaactctagaaatggtgcttatttccgcaaagttgatacgcaatttggcccaattgaagtgcaagtgcctcgggatcgcaacggtcaatttcatcagcacacgctgcctggctacaagcagcactcggatatcttggaaagcatgattatcaagctttactccaagggcgtgaccaccagggaaatagccgatctaattgaaaagatgtatggcagccattacattacagtccagctcaggtatcaaatatttccaagcagatgattccaaaggttgaggcttaccacaaacgcaagctaagcgacaagtttttctgcgtctatttggatgcgacataccttcctttgcgccgagaaacatttgagcgtgaagcagtctatattgccattggcatcaagcctaatgggcacaaggaggtcattgactactgcattgcacctagcgagaacattgaagtctggacagatatgcttcaaaacatgaaatcccgaggcttaaagcaagttgagctttttctttctgatggtgttgttggcatgaaaacagccttggccaggacttatcctaaagctcattttcaacgctgtttggttcatgtcatgcgcaatatctgcgctaaagtacgcgtcgacgatcgtgaaaagatcatgaatgaattcaagcaaatccatcaacagccaaataaagaagctgcgatcaaagtcttgcacgccttctatgacaagtggaacagagcgtacaaccatgtcatcagagatctcaaagagattgagcctgatctgctggtcttttacagctatcctaagcagatcagggcttcaatttactccaccaatatgatcgaatcctttaacaacgttatcaagcgtaaagctaaacctaaagcagagtttccaaatgaacagtcgcttgatacttttattggcattcaagcaatgagctacaacgaacgctatttcaatcgaatccacaaaggcttcggtcaggttcaggataccttagaatcctactttgattaaataaaagattaaaaaatcaatctacgagaaaaatctatttacacaaaagatttgacagtttctttatctaatatgacaagatattgtattttttattatttttttacttaattatgcattatccttactctctctaatgcataatcgtgttctataccaattaagaatccctttatatcaatactttatgttgtatgtcaattttgacatagccactaaatattgttaatctcgttttgtgttaaaaatcatttgatggagagaggatcaattttatgaataaaaaagtcaaaaaattactatctattggtgtgcttgcattgagtttaggtgcaattttaaccgcctgctctggtaaaaaacagggtgcaagcaataataaatcaagcgatgccaagcactctattgcattaattactggcggtaatggtgtaaatgataactcttttaaccaatctgcttgggaaggatttcaaagttatggcaaagagcacaacttgagccgcggtcgaaacggttatcaatattttcaatcaagtagtgctgctgatttcactcctaattttgatcaggcagctaaagctggttatcaaactatctttggcgttggttacagtttaaaagatgccgtagcttctgccgccaaacgctatcctaaaaagaattttgccattattgacgatgtaatcaagggacaaaagaatgttgtctcagctaatttcaagagcgaacaagcttcctacttggctggtgtcgtagctgctaaagaaaccaaaaccaacacggttggcttcatcggcggtgctcatggcgatattgtcgacctttttgatgccggatttactcaaggtgttaaagatcaagccaaaaaaatgcacaaaaaagttactatcttaaaccaatatattggcaactttactagttcagacaaggccaaatcaattgctcaatcaatgtacaccaaaaaagccgacatcatcttccatgctgctggtggtgctggtgatggtcttttccaagaagctaaagccattaatcaaactagaccagctaaagataaagtgtgggtaatcggagttgatgtcgatcaatctcatctcggtaactacactgctaaaggtgggcaaaaatctaattttgttttgacatcagtaataactggagtaaatgttgctgtcaaagatatcgccaatagagcttataataataaattccctggtggcaagaatttggtttatggacttaaaaacaatggtgtttctattgaacgaggacagatttcagcttcaacttggaaagatgcccaaattgctagagctaatatcctaaaaggcaaaattaaggttgccattcatcctaacaataaataaaagcatactagtatagtttgctttttataattacaatcaattattttttgcctgatcaatatttttgttgacaaaataccgaacaattaataaacttatttataaattgttcggtattaatattgtggaggacagaaataatgaacgtaaagttcaagaaaattttatcatttggtgtcgttttagcatcagttggcttgattctaactgcttgttcgggtaaaaagtctggtcaatcagccaacaaagatactaaacatggcattgccctaatcacagatgaaaatggtgttgatgatcattcatttaaccaagctgcatggtcaggatttaaagcatacggcaaggaacatggtttaaaacaaggaaaaggtggttatcaatacttccagtctagcagtgccgcagacttcactcctaactttgatcaagccgctacagccggctaccaaaccattttcggtgttggctatcaattagccgacgcagtcaagcaagcagccaagaagaatcctaaaaagaatttcgttatcattgatagcgttgactctgggattaagaacgtcgcttctgcaacctttgaaagcaatcaagcttcttatcttggcggattggccgcagcttacaccactaaaaccaacaaagtaggtttcattggcggtgctaagtcatctattattgatttattcgaagccggttttaagcaaggtgttgctgacggtgctaaagctcttcacaagaagatttcagttcaaacccaatacatcggtaacttcacttcaaccgataaggctaaatcaatcgctcaatcaatgtatgctaaccgcgctgatattatttaccaagcagccggtaacgcaggtaacggtgttttccaagaaggaaaagattacaaccaagcccgtccagcagctaaaaaggtttgggtaatcggagttgacgttgaccaatctaacctaggtaactacaagtcaaaagatggtaagaaagagaacttcactttaacttccgtcttaaagggcttagatgttgctactaagtcaattgctaatgatgcttacaatggtaaattccctggtggtaagcacttagtttacagcttaaagggtaatggggtttaaatcaccaaaggtaatttaaacgctaaaacttgggcagcagtacaaaaggctcgtcaacaaattattgatggcaagatcaaggttgctactgctccaactaagtaattcagctgcttagtattttgagaactcttcgttttttagcgaagagtttttctatagttaattaaggaagtatttatttacatgaaagaacagagaaataaagtaatcgagatgcgtcatattgtcaaagatttcgatggtttcaaggcaaatgacgatattaaccttacgctctatcaaggtgaaattttggctttgcttggtgaaaatggcgcgggtaaatctaccttaatgagaattttatccggcttgcttgaaccaacaagcggtgaaattctggttaataatcaaaaagtaaatattaaagatccaaccgtcgctaaaaagttaggcattgggatggtacaccagcacttcatgcttatggactcatttaccgttttagaaaatattattctaggacatgaatcaactaaaggaccagttatcgatctgaaaaaggcaagaaaacaggtcctagctcttgcacaaaaatatggctttgctattaatccagatgccaaaatctctagcattactgtcgcccaacagcaaagagttgaaattctaaaggtactttatcgtggtgcagatattttaatttttgatgaaccaactgctgttttaaccccacaagaaatttctgaatttattaaagtactcaaaaatttagctaaagaaggcaaatcaatcattttgatcactcataaattagaagaaatcaaggctgttgcagatcgagttacagttatcagacgtggtcacgatgttggtacttttgctgttgatcaagttagtgatgagcggttagccgaattaatggtggggcggcatgtcaacatgaagctaaccaaaccagcacctaacttgggcaagcaaattctagcaatcaaaaacttacaggtaaaaggaaatcacggtgccttaagcgttaaagacctttccctttcaatccgtggaggcgaaattttagggctagccggaattgacggcaatggacaagatgaactggttgaagcaatcactggtttacgccatgttaagtcggggcaaatcttaattgatagtcaaaatttaaccaaccaaaaagttcgcaaaatcaccgaagctggcgtagcgcatattcctgcagaccggcaaaaatatggtttaattcttcacatgtcattagctgacaacttagcgctgcaaacttactaccaacgtcccttctctaatcatggcatcattaatcatcaagcaattttgaagcatgccgtagatttaattaaaaaattcgatattcgaactactagccctgcattgccagctagcgacttatcgggaggtaaccagcaaaaagcaattatcgctagagaattaaatagaaacagcgatctaatcattgcattccagcccactcgcggtttagatgttggtgcaattgagtatattcataagcagcttttagctcaaagagcagcaggaaaagctatcctattaatttcatatgaacttgatgaaattatgcaattatctgaccggattgctgttttgcatgatggtcaaatttcaggcgaagtattacctgaaaaaactacagatcaagaactaggtcttttaatgaccggtgttaagaaagaagatgcaacaattgattaaagttacacctaaagtcaaaaatattctagtaccagttatctcagtaattgctggttttatagttggtgcaattatcatgctgatttggagttataatccttttcaagcatacagctccatgttctctagcgcactgggcaatatgaatggtattggtgaaactattcgtgaagctacgccattaatttttattgctatcggttttgcaattgcctcaaaagctggcttttttaacatcggtttgccaggtcaagcacaagctggttggttgacttctatttggattgtattggccaatcctcaattgcctaagccagtattattgcctttagctattattgcaggcgctatagctggtgctattgtggcaggaattgctggctatttaagagctcaatttggaactaatgaagtaattactactatcatgcttaactatattgtgctctatacttgtcaatatttaatgcaacaagtaatgtcctcaaaattaagaattgataccgatactaccaaaacaattccagccaatggcagcttaaagcttaactggttaactagcatgtttggtgattcgcgaatcaatgctggtattttcttagcaataattggacttattttttattggtatttaatgaaaaaaactaccgttggttttgaaatcaaggcagttggactcaatccttttgctagtcgctatgccgggatgtcttctaaaaagaatattattatttcaatgttactttcaggtgcattttctggcttaggcggtgtagtacaaggacttggtacctaccaaaactacttcactcaaacaactagtttggatattggctgggacgggctttcagttgccttacttggtggtggaactgcaattggtattttattagcttcacttcttttctcaattttaaaaattggtggtttgggcatgcaaactattgccggtattccttatgaaatcgtatctatcgtaattgctgccatcattttcttcatcgctatcaattatgtcattggtttgctttttaaaactaagaagaaccgcagtgattactacattccaaccagaaaagaaaaaggacccaacaatggtgttgatggtccaggtagaaaagtaatcgaaggagaaaaataatgaatttcgttacaatgatggcgttaattgtttcatccactttagtttattctgcgcctctaatcctagcttctcttggtggtgtttacagtgaaaactctgggattgttaatattggcctggagggtatcatgaccatgggagcctttgcggcgattgtcttcaacctaactttcgcttcaacttttggtgcagctactccttggcttggcactctagtcggcggaattgttggtttgattttttcattgcttcacgctgttgccacaatcaattttcacgctgatcatgtcatttccggaacagtgctgaacatcatggcaccacctttgggtgttttcttgatcaaggcaatttatgataaaggccaaactgaaaatatcaccgctaactttggctacttcagctttcctggtttaagcagcattcccatcgttgggccaatcttcttcaaaaacacctctgcccctgcttggattgccattattcttgctattttgatgtggtggattttatataagactcgctttggcctacgcttacgttcatgtggtgaaaatcctcaagcagctgacacaatgggaatcaatgtctatggcatgcgttatgcaggtgtattaatttccggctttatggcaggtcttggcggtgccgtctttgctcaagcaatatctggtaacttctctgtttctactatcgttggacaaggattcatggctttagctgccgttatatttggtaaatggaatccaatcggtgcaatgctctcatcccttttctttggttttgctcaaagcttaagtattattgggcatcaactgccaggaatcgatcaaattccatccgtttacatgcagattgcaccttacgttattacaatcatcgttttggtcctcttcctcggcaagtcagttgcacctgccgcagatggggttaactacatcaaatcgaaataaggaaaaaaggttgtttcacatgaaacagccttttattttacacatgtccacatagttatccacaagatatagcgcttatatgtggtagtcttactatatcttgtactaaataacagctatcggcgttttctcagttggcattggaaaatcactgttaagcaatctaagctcatcatctgtaagtttaatcttttgtgttgcaatattttccttcatgtgttctacactacttgccttaggaatcgttaaaacattgccattgcgcatcgtccaagctagcattatctgatgaggcgtaacgccatgatcacgtgcaacaattttcaaattacgcgtaattcgaattgtgttgcccttgcctgaattaaatggtgaatacccaataaagtttacaccgtgctcttcttgccaagcttgcagatcaaattctgtcccacgttcactgatattgtataagtcttcattagcaaagcattcttctccacctggcactgtaaaaagctcctgcatatcagccgtatcaaagttagatacaccccaataacggatcaagccatctttttgtaatgcttgtaagccgtggatcgtatcagacaagcgatgactgccccgccagtgtaatagataaagatccagatgatctgttccaagacgttttagactggcttctagactctgacgttctagttttggcgttgcatgataggggtagaattttgaaatcaaaaataatttttcgcgatcatatcctttaatcgcttcaccaattagctcttcgctttggccatccccatacatttcggctgtatcaattacactcaggccatgatcaaggccatagcgaatagctgctatttcatcttttttctttttaggatcttcacccaaaccccagctaccaattcctaaacctgttagtttttcaaaattcatcctcgttcacttccttatgttcaaattttaacataattgattcgtaattatttttatcaatcaattgacaaaatggtctattccattttataatggactagaccaacaaatgaggaggacttaattatgaaagttattgttaccgaaaataaaattcaaggtggagcaaaagcatttgaaatttttgaaaaaggaatcaagaacggtgctaaagtcttaggtttggcaaccggctcaacccctgaaacactttaccaaaactgggtaaaaagcgatcttaactgtgaaaatcttaccagcattaacctcgatgaatacgttggtttaaccccagataatcctcaaagctaccactacttcatgcaaaagcatttatttgacaagaagccatttaagaagacttacgttcctgacggtatggcaaaagacgttgatgctttttgtaaagaatatgatcaaattatcaaagacaatcctatcgacattcaactattaggaatcggccgcaatggtcacattgcctttaacgaaccaggcactccattcaacatcggcactcatgaagttaagttaaccgaaaatactatcaaggctaatgctcgcttctttgacagtatcgatgaagtgccaaagagtgccatctgcatgggtactgctaatattatgcaatctaagaagattgttttgatggcttttggtgaaaagaaagctcacgcaatcaagaaaatgattgaaggcaaagtcactgaagaagtacctgcatcaattttgcaaaaacacccagatgtaacggtgatcgtagacgaggctgccgcacaagaattagacgacaaatacaagaactaaaaacaataatttaattatcagcatagaaaaagctaggctttctacaatcgtggaagacctagtttttttatttagcagcctgtatctacaatgaaatatacttcacaaaattgcatttttatataaaaaatgaagcataattcagttttttattgaattatgtttcattcctattcgattttttatttctacccttgacttttagatgtgaaacataatcaaaaaatcacttgtgtgccacaacatatcgtattaaacttaataattgtctacatatggtatttaagaaagaatgtgattcaagttattgttttaagtgggccaattggagccggtaaatccagtttaaccagtattctagctgaacatttagggactcaggcattctatgagggcgttgataacaatcccgtattgcctttatactacaaggacatgaagcgttacacttttttgcttaacacttacctccttaaccaccgtttagcacagatcaatcaagcaattcaagaaaaaaacagtgtctccgatcgttctatctatgaagatgcactgttcttcaagatgaacgccgatagcaaggtcgctgatccaaccgagttcaagatctacgatgacttactcgacaacatgatggaagacactcctggcaatccaagtaagaagcctgacttactgatttacattcatgtctcccttgatactatgcttaaccgaatcaagaagcgcggtcgttcatttgagcaaatcagcactgatccaggtttgaaagattattacgcaagacttttaaagtactacgaaccatggtatgaaaattatcatgcctcaccaaagatagaaatcaatggcgacaaacttgattttgttaccaacatggatgcacaaaaagaagtacttaaagaaattgatgaaaagttgcatgaaatcggcaacttataagaaaaagaaggaacgtgatgacagttattgttttaagcgggccaattggagccggtaaatccagtttaacaggtattttatctaaatatttagggactaagcccttctatgaaagtgttgatgacaatccagttttgccacttttttacgctgaccctaaaaaatatgcattcttattgcaagtatatttcttgaacacacgcttccacagcattaaagacgcgctcactgaagataataacgtcttagatcgttctatctatgaagacgccttattcttccaaatgaacgctgatatcggccgtgctacttctgaagaagtcgatacttactatgagttattgcacaatatgatgggcgagttagaacggatgccaaagaagaatcctgatttgcttgttcatattaatgtttcatatgatacgatgatcaaacgaattcaaaaacgtggtcgtccctatgaacagttaagttatgattcaactttagaggactattacaagcgtctgcttcgttattacaagccttggtatgagaactacgattactcacctaaaatggaaattgacggtgataaattagacttcatggctaatccagatgataaagaaaaagttttggatcaaattacagccaaactaaaagatatgggcaaattacctgaagattgggaaaagcctaccgatattcaaattgaagcataataaaaaccattcatttgcgaaattatcgtatttgaatgattttttgtttacagtgaatttttcgctttattgttgtataatttgaaaaaatgtgtttaaaggaggagtttgaaaatgatgttaaccgtaactggtggacaatggtttttcccacttgtcataatttgtctaattttgggtattgtcgcaaccatcgctcaaaagaaaaagctgactaaactaaaaagaataaccgataactttgcctatgcaatattagttattctcttaatcattgaatggattctatattttcaaaaacaatttaattttattactccagcaatctacacccttgttgtcatctatcttattggacggcaattactaatcagataccgttcttctctattgaaaaaattaggggctaaatataagcaactgacaattggacttgctactatttacattattttagttaccttattgcttttaatcggatctaaattttcaactatgggctggatcattgctggattagttatcgtagcctttggcttcgttagctacatctttgaaaaagacaaacaataatttcccaggaaataataactcgcatagagcttctatgcgatttttatttattcaatttttgctaatgccttcgcaaccccatcatgattgttatcagcagtaatttgttccggagcaaatttttgttttagttctgctggggcattacccattaaaaatggataccccacttcttccaacatatcttcatcgttatagttatcgccaaaagcaatgcaattttgcaagtctacgccatattcttgagcaactattttgactgcactagccttgcttacaccctttaaaacaatttctaataaattctctgctgatctaacaaaagtcaaatcaggatatttagcagttaattcttcttgcatacgatcaagatccgctgaatctcccataattagacctttatgcacgccctgcagtttttcaagttgattaattgtagtcggtgttgcttttacatcgacaattctttcttcatttttaacccgtgggctcttttcttcactacaataccaaacatagccactatagatattccaagctgcatcattatcttgctcatcaacgtagcggcaaatttcagctgcttcttttgcattaaaaaaacggctgattagtactttgcctgtttcatcaagggctaaagcaccgttatacgcgataaacggacaaactttcaaaatttgattaaccactgtcatcatccctttaggaagacgtgctgatgcaggaacgaaaatattaccattaataatttgtctacgaattgcatcccgcgttgcggcggttacctttaaatcatcattaattaatgtgccatcaagatctgaaaaaataagttgtgcggacattctttcacctttatttcttttttaattcttatatcctaggataatgctttatttatgctaatgaaagctgattcaattaaatgcttttcctatcatttaaagataaattgcaataaatgcccaagtaatcattaaaataattcgcgtttacaaatttatttatcaatgctaaagtataagagttgtgttcaataagttaaaacacgaacaatattttggggagataaaatgaattttataaaaagctactttcaattagataagtacaaaaccaacattcgaactgaatttattgctggtttaactacctttatcagcatgtcctatattttgtttgttaaccctagcgtactgggcgccagcggtatgaataccggtgcagtcttcaccgctactgctttagctgccgctcttggtactgcaatcatggggatcgttgccaactacccgatcggtgaggcaccagctttgggaatcaatgccttctttgcttacaccgtatgtattgggatgcatgtttcatgggaaacagccttggcttcagttttcgttgcatcaattattttcatcttaattactttattcaaattaagagaaaagatcattgattcaattccagctgacttgaagttcgctatttcatcaggtatcggtttattcattgccttcttaggtttgcaaaacggcaagttaatcgttgcaaataaatcaactttggttggtttaggttcacttcacgatccacttgtttggattaccatttttggtttgcttgtaactgttatcttgatgatcttaaacgttcctggtgcaatctttatcggtatggttttggcagctatcttcggtatttgtaccggtcaaattgcattgccacacaaggttatctcaactgctccaagtttggctccaacttttggtcaagctatcttccacgttaaagacattaacactgttcaaatgtgggttgttgttttaaccttcctgcttgttactttcttcgatactgcaggtaccttaatcggacttgctcaacaagctggtttcatgaagaacaacaagatgccacgtgtaggtaaggccttagcagctgactcaagtgcgatggctgttggttcaatccttggtacttcacctgttggtgccttcgttgaatcaagtgctggtatcgccgttggtggccgtaccggtttaaccgcagtttttgtagcgatctttttcttaatctcaatgattttcagtccattgcttggtgttttcactagccaagttactgctcctgccttaatcattgttggagtattaatggcacaaaatactgctcatattcattggaacaagttggaaattgcagttcctgcattcttgattattttagggatgcctcttacttactcaatttcagacggtttatcatggggcatgatcacctaccctatctgtatgcttgctgctaagcgtggcaaggaagtcacaccgatgatgtgggtactgtttgtagtattcctgatcttcctgtgggtactgaacttttagatgaaaaagaatagataaagaaaaggactaagttcgaatttgaacttggtcctttttgtgtattcactaacattactttttattcttatcgattataatcgataaaaacgtcaaaatcaccaatcttatcgagtataatcgataagattgcaaaaaaagagtcttttatcgactatactcgataaaggctcttttttatattacccaggaaatattaacgtacagtttctaaacaatatgattttttataataaaatgcgtcataacaggcgaattttaattggctttaaaatttcttttttctaaaaacaagatagcctaaaagggtaaaaagaactatatagcacaatgtaccaattaataattgtggattagagagatgggaggttaagtgataagttgcataattataatactgtgtcgttaaattgagcatattcaaaggattccaacgaataatatcaaccggtccaatattataatttaataaattagatgatagactgcttcccataaagataataattgcatttatcataataactacggtgtttgaattaatcatacaagacattaagcaaataaggctgattattaacgtagaggttataatatcaacgcctgttgttgaaagcatatttataaataatgactgattatacttataagtcgcagtccaaggaactatttttgctataagtggaacagtgttaaagaagatagttacaatcatagctatggcatgtagaaaaagattataaataaaaattgtaatgaactttgcaagatatactgttcctttattttgagcatgatatagtaatgtcaaaatcgttttgttttggaactccattgagaaaatagttgaacctactatgaccaaaatcaacataattatttggctagagttataacaagtcataactaacaaattgccatattgttttcccatggccaatcccataaaaatcataaaaagaatcataaaactgataatccaccaaggcagcttacggtgacctaacttatagaattcttgttttaattccgcacgcataaaagatcacttccgcctaaatagaccgctttttaaacagtaaagcgccaatccaaaagaaaactacagcgtacactaaattagcaataattaattctgaattagtcaaatgtgttacagtaaccatctcattattcgatagttgcgtaatgatattaatcatatttaatggattccaggctaaaattgatttcaaaccaggaaaagccgacattgctaaatttgaaagatctgaaccaagaaatccgattgctagtccgattatgatcactgttgcattattcctaatcaacaaaataagcattaaagagagggcaacgataaatattaaataaatcatcgttcctcccatatttaggaatagcgcattgattaagggatgtccatgataatcatcatgccaagaaaatttcgaaccaaccatcaaggtcttgagaataaacgaaaagattatcccaaataccagtaagatgaaactataaaaaactaaaacaatgaacttagctgtataaagaatggacttatgtgatgttttgtagagtaaggttgccatagtattatttcgccactccattgcgatcatatcagaactaatagcaataatgatgataatagcccattgtcctgcaccgaatccttgagataagagtgagggcgtcattttataacttgtaccaactgtatacaacattagtactaataaaacgagaatcccatacaatggaatcttgcgatgagcaaatttatagaattcgtgtgagagattaattttcattattatctcccccttgttcttgccgtaagatgttgacaatcttctgttctaaagttaagccagttggagccaaatattctatccagatttcattatcaaacagtagcttttgaattttatctatatctttatgatcaactattacagcatcatcttgtctatcaaaaggaattttagcttgttgtagcaaattggtagtttgctttatatcagttgtttttaatttagattttggatttttttcttgagtgaatttgctcataggtgaatttataataattctaccgtgattaataatgattaccgatgtcattactttttgtaattcacttaagacgtgactggaaattaagaaggctgtaccacgtgcagcgtattcatgtatcagttttcgaattaagattgtagcttcaatatccaaaccattcataggttcgtcgagaataaccagttgcggattatttaacaaagccaaagctattcctagtttttgcttcattccaactgagtagtcttttgcctttcgatcaatataatctttcatccctaatcgattaatcagtttatccataccacttaagtctttagcatagagctttaaattatcatatccagacagaaaaggataaataacaggcttttcaattaaagcaccaacagattgtagtgctaaatgatctttaagagtaatttcgtgatcattaaaactaattgaaccagtgaatttagttaatcctagcaaagttttcataatggtggttttgcctgctccgttatgaccaataagtcctacaatttcaccaggtgaaattgtaaaagatgcatctctaataatctctttgtgaccataaaaaatatttatattgttaacttttagcatgctatcctatctcctttaactccggattagacagagagttaaatcacttttctaattaaagtacctatattaaagtctagtatcctttcctgaattgtcaaattaagtgcaacagtgtaagtgtcaatgtttttgcggtagcctttaaaccattagtctaaccttaatttcttaaatatttatatgacttaaatttctgcttagcttgcttaaataactattgccagctacctgtgcggttaatgcgccatgctggatgcctaaatgaacttcatgacgcttctttaagctgtcacgggccgctgcttttaattcctgttcagtcaatacagttatttctgaatcttcaaactcgctgctaagccaaaattccagctctcgattcttgatgcagcttaagatcctaagcatgccttctgctccagattttgaccatttcttgccttgccccttaacacggtaggtatacttgcggtggttgctctcgcagcagccaatggctttagtcacagtcagttttcgtttcttaaacggcttaatatcgtcccaatgacgatcaatataattccttaggcgccccagataatcatgattgagctcggtattcaattcatcaattagtcggctttctgcagtggttaggatagttttaactttgtcatagctgtatttgtattccaaagcagaaatcagcttgccttgcaggtcaggcgcaaaatatagcctttctttgattttcttatttaggtgaaagacatccaagaaatgctcatgacgcttgcatagccctacaatgtcatcgaagtctgttttggcatatccagcaccgccatcggcgttgctaagaattacagtatcagaaagatcataagtattggccaggtactccttggcttcgttcagcgcatcaagtcggcttaaagaaacaaattccttggcattgattcgctttctgcgtttcttgcttatattgacaatgccttcacagacctgatagcgatgaaattccaaccggcttttagtgcctttgatcaccacgccatcgccttcaagatacaaaactgggacctttttcttagtgcctgcggcatcatatcttgaatctgcttcttggcccgctttaatatttttcccggccatttttaccaaattgcccacctgcatatggctaatattaaagccagacaggcaattgactgctagagcagtattgcgataagtggcaacgctgcttacttctaagatgtttttgactgctaaaatactgtagcgcttgtatttgtcaaagcccattaattcatccaagggataccttgcttgtttgcctgggcagacatatcttcttctgacatacctaacttcgccaaaagccatattgattgagcgctcattcttcttatcaatctgatagccctgtgctttaaccttggtaatcatttcatcatcaactttagctaaagccaaggccatgatttccttaatcaggtttaagaagaaacagattatttttctttcacgcttaatataattatcttcagactttataatatttgcgatttcagttacaattgaattcataaaagaccagcttctaatgtgttttttgttcttaacatcagactactggtctttttgtttgagctcaagtccaaattcaaaggacttgggcttttttaattatttattcaacttaccgtaaaaaattatacacttaggcaacagttaggctatgaagaaatatattgcttgaagagttcttctgctgtctgatattggaggattcggcgatatttgtggttaatggcattggttgcctgttgaacataagcttttgacttgtctttcatgctcttgcccttagggaagaattgacgcaaaagaccattgcagttctcatttgtgcctctttcccaaggagaatatggatgagcaaagtagatctgacatcctttgattttggtcatatccgcaaactcagaaccattgtcaaacgtaattgatttaaaccaattaggatgtctgtcaatctccttttgaagcagtctttgacaagtactggcccgatagtcaggaattttgataacaacctcaaaacgagtggttctttcagtcagtgtcattaaggcaggttgatttttacgtctgacgcctttaaccaaatcgccttcccagtgcagggaaacttttctgttttcaacttctttaggccgctgttcaatcgaattgccaagattctttttatgcggagcatggccaccatgactatgatggcgtttgtttctgcgtcttttaagcttcattggcaggtcgatattgcttatatccagcaatccttgatcaatataacgatagacagtgggcgtgctaggacatggataatttggcataatcctgtgaaattcaccaacgaattcatcaatgctagtggcatcaaatttggctttaaagcgtctgcttagcattctgaaaaagacggcatagtgttgcagtggattacgcttatagcagtttctgcggcgcttttcatgataaatttgtgcagtatcagcgtaatagtgctcatacaagacatagctgctgtctctttgcaggacactgcctcgtctaatttcacggctgatagttgatttatgacagcctacttcttgagcgatagcagtgcaggaggttatgccagaatcaagcagagcttgaatttgtccacgttgttcgctgttcaattgatgataatgcttggaaatgctagaatttgagttggtcatgaagatcttcctttcttgatttttggtcacttcaagtttaggtcttcatggcctttttgtttaacacttagtgttgcacttcaattttaaatccgggtctagtatccttttaataaatattttttactatgttcacatatgaacaataaatttaagattatctctaataaaaccgattttaggatttttttgaataaatttgctttatttgtttaaatgcagtttcaaaaccatcttttagagtattcaagccctgcagttctaaagcggcccacatcaaccgtaaattgcgatcatcatttgtttccaaaaaatttaacataaaatgcatgtatttgtatcttattttttcaaaagcaaacctgtctgtaatatctaagccagaaattattgcatctaatctttttgccttctttagatcttttttaataagaatacgcgtggtgctagttaaatcgttctagacaatatgccatattataagctaaaatagctatttctagccgttgttgaaaacctactaagctcctggctcgattattctcagcattgtaatagctaagcaaagaaaagtcgctttcgattgttcttctaattgccattaactgatgatcattatgctttttagcacccctcatgtttttacgatatggtgtccaaagcacgtatcccatacgctttagcttggctgctaagtcttttcctaaatagccttcatctcctaaaagataatggttaattggatgagcattgatcatcaattctaccgtctcttttgcatcatgtaccgacgccttagtaactgcgtagtcaagcagatagccatcatcactcactattgcgtggactttgaagccataatagtagatttttttcgtcgctttataaccaatatcggctatgccacggaagatcttaacgtgataattgcgaacaggctgacaaactggaatcggaaaactgtcgataatcaataattctccacctacctttacttcctgattccaaccctgacggatacaacgaattagaggcaagagcattcgagctcgacggttaaaacgagaatgagataagccaacgaagaatttacagaatcttcgttgagattcaattccaatttcagtttgccaaatgagcatcgctaagatagaactatcaggaagcttggtctgatcaacatttttacgatgtttaagtccatcaggcgcataaagcttatacagcgagcgacaaatcacatttaaccgattaaaactaacttgtaaatggtgagaaaaacgattaagcttgagatagttcaattagatcagactcttttctatttaaattacttacaacttgagtctagtctaattggacttttttattaactaaaacgatttaactagcaccacgcgtataagaatatattctgcattaatcaaagtatttaaaatagctgtagaaaatttcgaaactgtcaaatcttttgtgtaaatagatctttctcgtaaattgattttttaattatttatttaatcaaagtaggattctaaggtgtcctgaacctgaccaaagcctttatgaattcgattgaaataacggtcattgtagctcattgcctgaatgccaataaaagcatcaagcgactgttcagttggaaactctgccttaggcttagctttgcgcttgatcacattgttaaatgattcaatcatgttagtcgaataaattgaagctctgatctgcttgggatagttataaaagaccagcagatctggttctatgtctttcaagcttctgataacatggctgtaaaccttgccccatttggtatagaagtcatgcaggacagctgtggcttcttctttgtttgtctgttgatgcacctgtttgaattcgttcatgatcttttcacgatcgtcgacgcgtactttagcgcagatattgcgcatgacatgaaccaaacagcgttgaaaatgagctttaggataagtcctggccaaggctgttttcatgccaacaacaccatcagaaagaaaaagctcaacttgctttaagcctcgggatttcatgttttgaagcatatctgtccagacttcaatgttctcgctaggcgcaatgcagtagtcaatgacctccttgttgcccattaggcttgatgccaatggcaatatagactgcttcacgctcaaatgtttctcggcgcaaaggaaggtatgtcgcatccaaatagacgcagaaaaacttgtcgcttagcttgcgtttgtggtaagcctcaacctttggaatcatctgcttggaaatatttgatacctgagctggactgtaatggctgccatacatcttttcaattagatcggctatttccctggtggtcacgcccttggagtaaagcttgataatcatgctttccaagatatccgagtgctgcttgtagccaggcagcgtgtgctgatgaaattgaccgttgcgatcccgaggcacttgcacttcaattgggccaaattgcgtatcaactttgcggaaataagcaccatttctagagttgccagtattccagccatttctggcatagggatcatagcccagaaaggcagtcaattcagcttctaacaagttattaacagcctgttgtagctctttgcgcaataaatcatttattttgtctggattgaatagagcttgagcaaaatctttggtaaaatcattcatgaaggagttcttctttctgtatgtgtttttttgttcaaaccaatcatacgagaaaggaactcctttttctaatgtttaaagaaataaatttaaggaatcattcatccttacacaaactattttacagtctcaaaatttcatttccaaatcgttattatttttaaaatagaaaactagtgaaaaagataaactataaatagttcttgggctaataagattctgagtattaccaaagaagtacacatcatcgtaataccaaacttcatctccagataaaatttttgaaaagtacatcgataatctctttttatagttatctgtaaaaatatccactcctgtaagatcgtaataagcattacaataaatggctgcttttaaaaaagttcgtttatcgaaactgtcattttcaacttctgataacaattttttagattgcgtttttaagtaattaatatcattactttcatatgcttttgaaacttctaaagttatattttttagataattcgaaatattattattaaagaaatctattttttggacatgaattacttcgagtagtttgaatactttttcaatatctaaacctgcttcgcctctttcccatctttctaattttgaacgagaaatacctactgcttccgcagctttactacttgaaattttggttgcctttcttaattttctaaattttctaccatatgtttctttcataacccactcctagttacgttcacaaataccttcaaaataatgatccagataaaggactagttttacctccttaatgatgccttaatgcaataaaaaatcaaactcataaatattacctaaattttcatttagagctactaaaaaagcctaataccatcatcaagggtattaggtctttattacctaggaaatactaacgtacagtttccaaacaatatgattttttatgacagtttgggcaacgcaattttctagtatgtggcgtgtgtgccgcaaacataaagcttttaagttctggaacaaatttgtaatcgcaattaggacaaatatatgccactttttgataataatttttaagtaacacgaatgacattgcaatcaagcttactactaaaatagctaccgaaatataggctgcagtgttcatcttattgatgatacagtacgcaataaatgccataccgaccaattcaacagtgatttctactgctgacaatttccacattgaacgtgttacctctttgtatctagtttcattattcatgattttcgtaatgtcagtaacttccgcaatattattgggtttacttagaaccttttgtagttggataattttcttgttttgctcttctaatttttgcgtttctgctttatttctttttagttgatcttcaagcaaaagatcgattaatttatcaccatttttatcttctagtattttttgaatatcctttaacgaaaagccaagctcctttaaaaagatgattaattttaattgttttacctgctcatcagaatataaacgatagccactttcactaactcgactgggtttgaccaaacctttttgatcatagtaacgaatggttctagtggttatgtttaacttctttgctagatctccgattgtgtattctgacattactttctcacctcacaacttaaatatacgggtttacgctacgtcagagtcaagaataagctaaattttccgtaaaaaacttcaaaaagcaaatattttgctcttttcctattgaaattattaacattaactgtataattttaagtgaatgttcactttatacaaatttcggaggactaaatgaacgcaatcagtaatttctttcatttaaaggagaacaatacctcctttaagaccgagcttttagccggtttgactacttttgtaagtatgtcatacattctgttcgttaacccaaacgtcctaggtgccagcggtatggataaaggtgctctattcaccgttactgcattgtcggctgcctttacctgtatcgtaatggggcttatcgctaactacccaattgcttccgcaccaactttgggcttaaacgccttctttacctatactgtttgtttaggcatgaaggttaagtggcaaactgctttagcagctgttttcgttgcatcaattctgttcattttgttaactgtctttaaggtacgtgaaatgatcattgatgccatccctgccgatattaaatatgctatttccgcaggtatcggcttattcatcgcctttatcggtttgcaaggtggtaagttgattcaaaacagtgattctaccttagttactattggtagtctcaacaaccctactgtttggatcactatctttggtttaatcattactattttcttaatgattgccagagttccaggtgccatcttcatcggaatgatcgccgctgctgtttttggcatagtgactggtcaaattcccatgcctaaaggcgttatctcttcagttccaagcattgctccaacttttggtcaagcagtcttccatattggcgatattaataccgttcaaatgtggatcgttgtctttacattcttacttgttactttctttgataccactggtaccttaattggtttggttcaacaagcaggtctgatgaaggacaacaagatgccacgtgctggtgaagctctagcagctgattccagtggtatgttggtcggttctgttcttggtacctcacctgtcggtgcctttgttgaatcaagtgccgggatcgctgttggtgggcgtaccggtttaactgccgtttgggttggtattttcttccttatttcaactatcttcagtccaattttgagtgttttcactacccaagttacggcaccagctttaattattgttggagtattaatggccgaaaacttggcacacgttcactggactaatcttgaaattgccatcccatgtttcttaatcgcattgggaatgcctcttacatactctatttcagacggacttggctggggtttgattgtctaccctgtatcaatgatcgcagccaagcgtttcaaagaaatcacgccaatgatgtggattttgtttattgttttcgtaatctacttcgttgttttaaatgtaaaataattctatcttataacccccttatcttacttttacattaatatataccctcatctaaccaagtagcatgtctacttggtttttatgctaaaaagatgtctgttaatagtatggatgatgacagcagattctattagatgatataataatcaaagaaaggctgtgactaaaatgaaatcatataaaaaaattcaagctaatgttgactcctcactagcacttcaagcagaaggaatttttcaagatatagggctcaataccactaccgcaataaatgtgttcttaaagaaagttgtggcaactggtggtatcccatttgaattaaaagaaactcctgaacaaaaagcctcaagagaattaattcaaagcatctcaaaaattccccacaaagaagctaaaaccaaaaaggaaattgaggattggctagatgaggactaatgatattgtagatatttatgttgcttacattgataagcctggaggaaaaaataggcctgtattaataattaaattactaaacagtaaagcttggctgctaaaaatcacttcaaaatataaagaaaaaagtgaaaatatccgaaagcattactttcccatttttgactggaaaaaatataatttagataaaccatcatacattgatactaaaaattatttaatagttactattagtgatttaaatatcgaaaaataccgaggccatttctcaatagcagatttacgcaaattaaaagattttattgacgaaaatccaaactaagaattaaactatatgttttagttcctaaacacaatctcaaatatgagattgtgtttttatttatccaaatggcatcttttgataatcatttgacgccttatgatgttcggattcttctaaattgccgctatactattttcaacaaatcgagttatgaaagatttatttaggaggaattcattatgacaactcaagaaggaaaaactgctttaattactggttcatacggtgggcttggtacccaattcgttaacattcatgcttcacacgggggtgacctaatcctagttggtcgcaatgctaagaaattagccgatcaacaaaaagaagcccgtagaaagtacaacgtaacggcgcatattatcgatgttgatctctcacaaccagatgctgcgcaaaagatctatgatacttgcaaaaagaacggttggactattgactacttaatcaacaatgctggctttggtggtcaaggcgaattcattaaaagaagtatggaacaagacatgtccatgatcgccgttaacattgaaacgcctactcgtttaactaaattatttttacctgacttcgtaaaacgcggccgttatgcctggcccacttcaagccgtttactacgctactaaagcatacgttacaagctggtcaaatgcgttatggcgtgaagtacaaggcacaggcgttacggtaagctgcttaatgcctagcgctatgcaaaccggttttatcagtcgtggtgatttgagttcaactcaattattcgcccatgcggttagtccataaggtgttgcaaaagctgggtatgaagaaatgattgaaggcaagcttaacattaccgctggtttaactgcagcccaaaaaccattcatgaaattggaaccaatgttacctaagaagatgctcatgaacaatgtttataagatgcaagaacaaggtagtagaaagtaatcaacttatcttataatatggatcaaaaggatggtatttgaatgaatcactttattttagatggtcgctatgaagacctactctcttttaacgttgaagaagcacttaaaaaagccaatattcctgaagattgtttcaaaaaactccatccttcaatgtgtgaacaacaatactacaattttatggcggctattggtgatcagattagtgatccattcactccaattgaaattgcaactacaaatccaattgaatctttctctccaccaatttttgcggcatatagtagccgtaacggagatatttttatcaagcgtctagccaaatataaaaagctgattggcccattatcttttaaaattgatgaggatagcaagcagctctctattaccctaactccaagtaatcagcaatattccctaccctcttttctagttttatcagaatttgcatttttagtgggacttttgcgcaagacgaccaaagaagctatttccccgctgaagatcacaatgacatcccccgtcaatgatgagcaggtcattaacttctttggctgcaaaatcgaatcgggtaaacgcaacaccatcacttttgccaaaaaagacttgcaggtcaattttattagttataactaagcaatgtgggattatttcaagcctgaattaactaaacgcttatctgaattatccgttgatgattcaactagtgctagagtacgtagcatattgaccgaattacttcctaatggtgaatttacaattgacgatgtagctaaaaagttaggttattctaaacagactttacagagaaagttgagtagcgaaaacactacttttcaaaaacaactgaactccacccgagaagttttagcgctaaattatttacaaaacaccgatatgacaactagcgatattgcttaccttctaggctatcaggaatttaattcgttcttacgtgccttcagcatctggaaaggcataagcattagcgaatatcgtgaaaaaatgaataaataataaaaagcagatatattttctgtttttttactttataaaggaaataatatgagatttttgctataatttactttataaaggaaataatatgaaaattgctaaaaatttactttatgaaggaaataatatgcagttaaatttaattaaccgcccacagtatttaaatcaattacttcaatttcaaaatacagaattcatcaaagtactgacgggagtacgaagatcaggcaaatcttatattttaatgctttatcgtgaatatttactcaaacacaacataaatgaacatcaaatcatttatatttcttttgaagactttgataatatagatctttatgaacctaaaaagctttattcatacttaaaagaacgaattattagtgaccaaagaatgtacattctacttgatgaaatccaatatgtatcagattggcaaaaagtagtaaatagccttcgacttaatcctctacttgatatcacaattactggcagtaattccaatctattaagtggagaattagcaaccttactatcaggaagatatgtagaaatacatgtttatcctctttcttttaaagaaatgctagattttaaacatatttctgaaccatcagagcgtcagattgataacttatatgatgaatacattaaatatggtggtttccccgcggtagtgttagcaaaagaagaattaaaacaaactattctttctggaatttacaataccattattgtcaatgatatcggctacaaaaatggattaagagaaccagaattagttgcattagtagctaaatatctagcagattcgattggtcaattaattaatccgaacaagattgtaaatacactaaaatcagcaaattttgatatctcttataacgctgtgcagcgttaccttaaatattttgaagaagcatatcttttttataaatctagtcgttatgatattagagggagaaagattctttctactcaaggtaaggattacattgtagatactggtttgcgtacccaagctttaggagaaagaaataatgaccgcggtagtgttttagaaaatatagtttatgtcgaattacttcgccggggctacacagttcaaattggtaaattagataataaagaaattgatttcatcgttttcaaggtaaatgataaacaatatattcaagtaacctaccagcttccagaaaattctactagagaaactgataatttacttcaaattccaaataactacaaaaaaatagtcatcactggccgatatgaaaatgaagaaatgatttccggtattccaataatcaatattaaagattggttattaagctctaaaaactgatcaaaataggatcgactaactcatgtcgatcctatttttaaattaaattatgttttttacaataagtaaaaattccgtcatcttgcacgctgccacaggtgtcatcagcaatttccttcacatcgtctgttgcgttccccattgcaacgccgtgaccaacagtctttaacatttcaatatcgttgccgccatcaccaaaggctattgcttcgctcacagggatttgataataatctaacactttttcaattgctacacccttactaccagtagctggaataatatctgctgctctatcccaccaagctgttaccttagcattttgcgtattagctacaagtccgtcataatctttttcacgacagcctaccattatttgataaaccgtatcctgatcgacaaccacatcaaaatctggcgccactctcaaatccgttccaccaatagcaaagtattcctttaaatcctcatcaacaccattagctgcaatccgtgttttggtagctacagctaacggccgatttattttctgagcattttgaatcatatgcaagacatctccttgccttaacggattatcaaaaacaatgtcttgatcgttatagcagtaagaaccattaaaagttaaatatgcatcaaaatctacacccaacttaggcagttgcactggtggtctgcctgatgcaatacaaatcataatgccgttgtcttgtaaagcatgcagtgtctctagcattttaggtgtaattgattttttcttttcaattaaagtaccatctatatcaaaaaatattatcttaggtttgctcattatttttaccttctaaagaattttctactaattattatactttaaccgatatttcccaggaaatattaaaattgagctctcttcctcaacatctgtgctaaactagatacaattagtttctttaaaagttaatagttacggaggaatttttaaatgcagacattggaaaaagtctttcatttacaagatgctcataccactgttaaacgtgagttaatcgctgctttaaccacttttgtcagtctcttctacatcttattcgttaacccaaacattttgcacgcagctggtatccctaaaggtgccgcttttactgtaacagctcttgccacagcagttgggtgttttttaatgggttttattgctaattatccgattgccttagctccaaccttaggtagcggtgcctttttcgcttataacgtatgtgttgggatgcatatttcttgggaaacagctttggctgcagtccttgttgcttcagttttattcattttaattactgtctttaaattacgcgaattagtggttaatgccattccacaagatatgaagtatgctatttcagcaggaattgggttattcatcgcttttattggcttaaaaaatggtcaattaattgttaacagcgattcaactttagttactctgggaaaatttagtactccagcagtttggatcacattatttggcttaattttgactgttgtattaatggcattaaacgtgcctggttctatctttattggaatgattgttactgccatcttcggtatgatcattggtcaaattccattaccacataacatcgtttctggtgccccaagtattgcaccaaccttcggccaagcggtttttcacattaaagatattaatacagctcaactttggatggttgtactaactttcttattagttaccttctttgatactgctggtactttaattggaatgactgaacaagccggtatggttgacaaggatggcaagattccacggatcggtcgtgcttttttggctgattcaactgctatggttgaaggtgcagtctttggtactgctccacttggaacttctgttgaatcaagtgccggaattgccatgggtggtcgtactggtttgactgctatctttgttggtattttcttcattatcagtatgattttcagcccattgttacaagtaattccaactactgtaacggctcctgctttaattatcgttggtgtactgatggccagcaacttaaagaaaatcgattgggaaaagttcgaaattgcctttcctgcttttcttaccgttgtagggatgccactgacttactcaatttcagatggtttggcattaggcttgattgcctacccaattaccatgattgcttctaagcgttataaggaagttagtcctatgatgtatatcctgttcgtagtatttatcatctttttcttagttacgaatttataaaaagaatgctaaagataagcagtttgaagctgcttattttttattgacttgatttttattttgtactactgtaataaatatataagacagtttttatgggagaagaaaaatgagactgtaaaatagtttgtgtaaggatgaatgattccttaaatttatttctttaaacattagaaaaaggagttcctttctcgtatgattggtttgaacaaaaaacacatacagaaagaagaactccttcatgaatgattttaccaaaaatatggctcaagcactattcgatcaagacaaagttaatgattttttgcgcaaggaaattcaaactgcagttaatcaattgcttaaagttgaattgactgcctttctgggctatgatccctatgccagaaatggctggaatactggcaactctagaaatggtgcttatttccgcaaagttgatacgcaatttggcccaattgaagtgcaagtgcctcgggatcgcaacggtcaatttcatcagcacacgctgcctgactacaagcagcactcggatatcttggaaagcatgattatcaagctttactccaagggcgtgaccaccagggaaatagccgatctaattgaaaagatgtatggcagccattatagtccagctcaggtatcaaatatttccaagcagatgctccccaaggttgaggcttatcacaagcgcaagctaagcgacaagtttttctgtgtctatttggatgcgacataccttcctttgcgccgagaaacgtttgagcgtgaagcagtatatattgccattggcattaaacctaatggacataaggaagtcattgactactgcattgctcctagtgagaacattgaagtctggacagatatgcttcaaaacatgaaggccagaggcttgaagcaagttgaactctttctttctgatggtgttgttggcatgaaaacagccttggccaggacttatcctaaagctcattttcaacgctgtttggttcatgtcatgcgcaatatctgcgctaaagtacgcgtcgacgatcgtgaaaagatcatgaacgaattcaaacaggtgcatcaacagacaaacaaagaagaagccacagctgtcctgcatgacttctataccaaatggggcaaggtttacagccatgttatcagaagcttgaaagacatagaaccagatctgctggtcttttataactatcccaagcagatcagagcttcaatttattcgactaacatgattgaatcatttaacaatgtgatcaagcgcaaagctaagcctaaagcagagttcccaaatgaacagttgcttgatacttttattggcattcaagcaatgagctacaacgaacgctatttcaatcgaatccacaaaggctttggtcaggttcaggataccttagaatcctactttgattaaataaaagattaaaaaatcaatttacgagaaagaactatttacacaaaagatttgacagtttcagaaaaatgaaaatcaaaaaagtactactgaccacgtctttactcacgattagtttgattactctatcgggatgtagtttccacctgtttaccaacaagaattccggtcctacaatcaaacgaactttgtcctctaagaaattcaattcacttaaggtagccagtgacattactgatgttgaattacatgcaagtaatcaatacaaagttatctatcatgggctcaagcgtttcaaacctagcgttaatgtgaaaaatggtcagttaaagatcactcaaactagtaatggtgtttcttataacatcaaagaaggcaatacagtggcaatctacctacctgccaaagaattacaaaatatcaatattaatctttctgatggcgatatcgatgctgatggcaaggttcaagcaaaaaatgtcaaacttcacagtgacgatggtgatgtcaactttgacgatttaagaattagctctggcaaaattacctcagatgacggcgatatttcagtttctaatctacttactagaaaaggcgccacagttgaatcagatgatggtgacattcgtattagaaagagcaatgccagtggttaccgcctaacttctgacgacggtgacgtcacattcaagggagatacttctgataatgatgacggtggttcttactacaaaaatactaagagttctaacctgctctctgctcacagtgatgacggcgacgtcaacgttaactaaatttcgtcataaggcgataagtttcacatgaaacaaaaaatcaatgcatcattgataatgcattgattttttacttttttcctcattcatagcataaacacgactttacaagattatttaagtttctattgaaatagacataattttaatacgaaaaagataagactaaattctacttttccattaaaaaatatttaccaattttccattttctaagtcaaaatgatgcgtaaatttcttcatcgtcgttgatgaaatatggtggtcaatttcaattactgttaatggtgaattcaaaaagacattatgaatttgctcagcagtttgcggatcaagtgaagcagttccttcatcaactactaaaatttctctttggaagagaaaagcacgcgctaattcaattctctttctttccccacctgaaagattatgcccattttcttcaattacggtatctaagccatgtttttgaaggtaattagttaatcctgcttgttgagccgcagccacgatttgcttttgatcaaattgtttaccaagagttaaattaaagcgtaaagtcacattaaaaatttgcgaagattgttgaacttcactaaaaatttgcgtttcaacagcctgatcattaaccaaaactcttcccttctgcggagataatttacccattaacaccttaagtaaagtagatttaccttcaccagactttccggttaacagaattttatctcctttattaacacataaactcacattattaagcactggactatcagcttgatagccgaaagttacattgtacatatttaattgcttaaatttgactggagcttcatcttgcttagtcgttaaaggcttgaaagataacaacttagcggtcattggtttagtagcagcaatctgattacgaatactattaatactaaagaaactatttacaatccaagcgctagagtattgaacggcaacaaaagaagccaaagcaatgtgtccttgaattaccataataatgccgattccaattggtaagaagtctagtgagtaagctaataaatcaacgtaaaaatcacttttagcaattgtatcgtcacgttcacgtttattctcaacagaatttttaattactttactacccttctttacaaatagagataatacattgtaatttaaaaccgtattgatatttttgagtaaatccgacataaacgttacataactacctgttgatttactccaattggatgactgattggctgttttcttgctaaacaaactaggaataaggcttgaaagactggcaaaagcaacaaagactaatgtcaggactacactatttatcagcgcaatagtaacgataccaacaattttaaccacagtagatactagtgaaaataactgtctaaagtacttttcttcaatcaggttaagatcattattaatgaaagaaattcgattagaaatttctttttctcctgtttttacaaaatccgtctgcatcagatactcacgaacttcttgattaaatagtgctacattacgattaattactcgattatttaagtattctacaattacaagtaagatttgcaatactgtaattacgataatcattctcaccgtatttggaatacttttacctgtaattaacgcaaaaatttcggagtatgaccatgtgctaaaagacaaagataatccgcttaaacatgacagaataatactgagcgaaaaccatttgaggtcaataaactttttcataaatgaatctccctttcaattaagttggattcattatctgctttagttcacgataaaaatagctttctgcaaaagtgatcttcaatctgcatatatgcagattattctggaagaatagacagaatattttctaaattacttgccttgatcaatttcttaatagctaatacctgctctgtatctccagcaaaatagcattgataaaaatgaccaatgattttatataagactaaagatggcgtttgacttaattgcccaagtaaataaataggctctttattatcttttacaaatttattttcagcacaagtatataaataattcacacaaatagtggcaattgttgtttgcattttttctgtctgctcagacattttatcattataagtagtgagaattttttgaaagaaaaaagcaaaatcgtcatgagtaaagatagaggtaccaaaattggctaacaaatctaaactaaatttatcttgaagccaattgtcgcctgcaaacaagcgttgcagtactatatttttatctttgacatcaaatttacgttttccttctagcaaggtaagaatcaacttagctttgattttcagaagatcatgatgaggcagttgttgaatttctgttaccaattttctaacttggttaaagtcttgattataataagcagtctgtaattgatcacctaaattgttttcatcgtcagcttgtgcgactgaattttgcttaaagaattcatcaaatgaaattttatttttctgcaaaattgccattaagtccttagctgatatttcatgcaatccgcgctcaatcttagaataatgggcaggtgataaaattcctgctacaaattgttcttgcgtcagtccccgcgattggcgcgctttttttaatgctgtgttaatttccatagctgtttttatttcaatttacggtcccttttagatacaaaccaaattgtcccatcagaagttgcccagtgtccatcagaagttttatgaaatttcagcgtcagtttcttactgtgtagtgtccagctatttttaccttccattgtgacacggacccggcctaatttttctgaatttattttgttattgtagtctttgggatcatatgaattatgcccatatactttataaattgcttttgctgccgcagtatttggcttaatgtatttataagtaccagatgcatcagtcttaaaaactgggctggatgcatcgatttgaccactatttttccccagagctatgttcaccaacatgccaagatgattttccattacagaatctgtttgatggggatcataggttgtaagatttttattagcaaactgttctggaatagtttgctgattgcgataaaacaaccagccaccgactgccagaactacgactactacaacagttatgattgtagctttctttttcataaaggatcacctgttatctatcagcttttttctgaaaagtaattaatccgtgtgaaactaatctaacagttccgccataataaactacccaacgtactttgccattactgtactcttcatacattctctcccgctgaagatatccattatatgtaccatcattataaggaatttccatcggagtatctacagcaccatcataagcgccataacgcgtcttatgccatgggcctgttctcttaactccatgaacttttttagttaacggtagtttttgaacgttttaaactgaatctgtactagattccgcagcagatacaacagcagtattagtggttgcaaacagagcagttgctgagaataacactaaagttgcttttcttaatttcatatctaacaccttatacctttcttttattgtttattttcattacctagttgttcattatcattgacaacaaaatttgtcatcattttctttttacttgctaatgtaggaattgggtagcttttaagtttagtattatacaaatagccaccgtacataattcctgttggattatgccccattggaacagtgtacatcttttccagatatcctctaaatacctcattgcctcttcttacagtgtaataaacataagtaccctgatcatgatagtattgacgttgataccagatatgttcaacaaatccttttgattcagtgctttgtgttgcagcttgtacatggtttgattgaaccaaagctgaagttgaaactgatactagtgataaagctaatgctgctttagctgttaaagttaaaattttcttatttcttttcataactttaacctactctttttttcttttcttgctttaattactacctaatccagacggaataggaacccatggacccatatttttctctcctttcttatttatttttcattaattttactttcactactaagaactgttcagaaattgtcaaagatgacaattttctacaataaaattcttaatcaaatgagacattccattacttttcataaattcaataatctgatctacttcttcatttttgccatcaaaacaataatggtaataattggcaactattttagcaaaagcattacgtggaatttctggcaatttagaaatgaaatcgtaaattagatttaaatcaattttccttctttgtacgtatacattagccaaataattaatagctattgctgacattatttcttgtagttgaccagacagattagatacattatggcgatacgttctaaatattgaattaatcaaaaagtccatatcttctggggcatatatcatcatagtcattgcaaaaatttgtagagtagattcactccactcatcagaatcaaagacaatttgtctaacttgtcgtttaatattctcagatatttgatcaatttgtttctttaaagatgctattgaaaataccactaaagcataaagattaaatatattctgactttgatttttatattttccaatttcaattttcaaatcttcaagtcgttcgatctgctgatgataatatgcatcttctaattgcttttgccagatcaaatttttgtgagcaagatcattttcactatcttcattttctattcgctctaaaaatatagaagcttgcaatccatgttgctttaacaaatcaattaaatcctgagtctgaatatcatttaatccacgttcaatttttgaatagtaagatgttgataacacatcccccgccatttcagtttgtgataatttcatactttttcttgtttgttttaatgcttcaccaattgtcatatctttccctccctcgtattatcatatttttcattattgtataatgttttgttaattttgcaatagtttgtaaaacaaaagcattatttttatttttcaatcttttatgtttacaaatgtaaacttagcgagtagaataaaaaatgtgaagagatgaaaataaattatttaatttggaggttacggtcatggatgtaactaaaatcattatccttgttgtcgcaatcgccttgatcggctttatcctttggtggttcttcggcaaacatgacgaagctatcggtaaagcaagtgttaatcaaggcacacaagaagctaacatcgtcgttaacggcggttactctccttctaccattgttttaaaacaaggcgtaccagctaaggtgaattttgatatgcaagactctaccgcctgtttatctcatgtcgtctttgaacaacttggcgttgacaaagatttaactaagcaaaaagttactacagttgatattccgactgataagaaaggtacatataattttgcctgcgggatggatatgttccacggtaaagtcattgttaaataaggagtttacaaaatgagtattttttcaaagaatcaaactaaaaaagttgttgttaatgcagaaaatcatggttataaaccaaacacagttactttcaagcaaggtaaaccagctcaattaaagtttattccatcagataatatgggctgcatgaatgaagtagtctctaaagatttaaattttgaccaaaaattagatggtaaaaaagaagttacgattgacattccaactgacaagccaggtacttacacctacgcttgtggaatggatatgttccgcggaaaggttgttgttaaataatgaaactttcaaacattaagcgcttctggatctcatttattctagctattccaatgctaatccagatgttcgccatgccctttcactggatgatgccaggctataattggatcgcttttatcacgactacaatcattatggcgatttccgctgccccttactggagcagtgcttgggccgcttttaaacaccataacgctaatatgaacacattagtagccgtcggtacttctgtagcttacttttacagtatctttgctatgtttactggacgtgaagtctactttgaaagtgctgctttcgtcaccgtcttcgttttgctcggggatgcaatggaagaaaagatgcacaataatgcctcgaatgctttagctaaactaattgatctgcaagctaaagatgctgaagttgaacgtgatggcaaattcattaagttgccactagatcaagttaaagttggtgacatcattcgcgttaagcctggtgaaaaagtccctgtagatggcgtgattgttgacggttcatcgactcttgatgaatcaatggttacgggtgaaagtatgccagttactaagaaaaaaggcgacgatgttgttggctcaaccatcaatactaatgggacttttaccttcaaagcaactaaggtcggtagtgacacgatgctttcgcagattgttgatttagttaaaaaagctcaaaccagccatgcgccgattcaaaacctaactgataaaatatctaatatctttgtcccagtcgttttaattattgcaattattaccttcgtaatttggtatgttttcttaggcgcaacattggttaatgctatgctcttcgccgtttcagtagtcgtaattgcttgtccatgtgcactaggtttagcgacaccaactgctttaatggttggtactgcccgtagcgctaaaatgggcgttttaatcaagaacggtgaagttcttgaagaagttagcgacattgataccgttgtgtttgataagactggtacaattaccgttggtaagccacaagttactaatgttgtaggtgataaaaacaaggtcttaactattgcagctagtttggaagaaaattctgagcacccactagcaaccgctgtagttaaagctgctaaagaagcaaagactgaaattaagtctatacaaaactttgcagctattgaaggccgcggagttaaggcaaactatggcaatcaagaagcttttgttggtagcgatcgtttattagaagatatttctatttcccaggaaatgaaagatcaggctctccaacttcaaaaagaagcaaaaactgtagtctatgttggcctaggtaatgacatcattggcttaattgccattcaagatgtacctaaagcaagttctaagcaagcaattgcggaacttaaaaagcgtggtttaaagacggtgatgcttaccggtgacaatcaaaatgttgctgaagctattggccgtgaagtcggaatcgaccaagtaatcgccggtgttttaccaactgaaaaagccgctgagattaagaaattgcaggatgaaggcaataaagtagcctttgttggtgatggtattaacgacgcacctgcactgtctacagctgatgtcggcatcgccatgggatcaggtaccgatattgctattgaatctggtggcattgttctcgttcaaaatgacttaatgggcgtagttagagcgcttgagatctctaagaagactttcaacagaatcaaattaaacctcttctgggctcttatttacaacactattggtattccaattgcagcaggtttattcatggcctttggtctgcagcttagtcctgaacttgcaggtttagctatggccttctcttctgtttctgttgtaactagttcacttttattgaataaaacaaaaattgctggtgaaacagctcaagtttcaaagtaaaataattctccgaccggatattttaatccggttttctttttgtaaatttttcaatttgcgacttaaagtttcagcagtaatacccaaatatgatgctaagtctttcttttttaactttaattccacatttttactcccctgtttttgagctaagtcttgcaaataggccattaagcgttcctgagcatccattgaattgcgccgaatagagttagtttcgattgtaaccagctgctcgccaaaattattaagcaaattcaatgctaaatctggcgtctttttcaataacttttgaaaatcacgacgctcaatagaacaaacataagtatcttgtaaagcctgcacaaagttttcctgggcatgttcttgaaaaagattctgctgtccattagcatcgccttgattcagcacacctaatacggtctctttaccgtcttcgttgagattgtaaatcttggcactgccttgatccataaaaagcattccgttcttaccatcacctggttgtcgaataatactgccttttggaaaatattcttggtgcgttgaaattggtactagtttttctaacatttcatttggcaaatttttaaatatggctgctttgcgaatacaagccatgggtgaatgttgcataaaagcctcatttcttgatctaagtcaatttatttttatctgcatcttaatacaatgtatttaacaactcaagcagaaaggaaatattaatcatgactaaatacatcgcacatattgagcctttaaacgctaaaaaaattggtaccaaggcacacggtactgccacttttgaaaaaaaaggtgatcaactacatattcacgttgagatgtttgatactccagcaaatattgaacactgggaacatttccatggcttcccgaatggtcaaaaagctcatgtaccaactgcagctcaagacgttaaccatgatggctttattgatttaccagaaactgagccggtctcaggaactacaatggtgccacttgatgatgccccagaaaacatgaatattcctcatgatggttatcctgttgccgacagtaatggacattatgaatatgagattgatgtctcattaacaaagctacaaaagaaattcaaagctgcctttggtagcgataaactacaactagacaagcgtgtagtttacgttcatggtgtacctgcagatctggaattacctgatactgtaggtggttgcgtaatgagttatgatgcccatactaccttgccaatcgcagctggtgaaattgaaaaagcttaagttaaaagccattccttgtgaatggctttttgcatcctttcttattttttgatagcatagatatagattatgtaaaatatctaagaaaaggagatgttttataagtaggcttagaccctactcttatggagaataacgaaaaaattatccaagaaaagaaacgcgaaaaatttattaaaactaaaaagaattacaagcgtgcaccactaatgtcagttcacttaagagtgatgatggccgttatcttaggtcaaatcgcctgtggctattccctgggaattagtggtaccgctctttctaatgcagctaaatatatcaacattagtgacttctggactggattaattggggctggtgctttaattggccttgctggtagtcttttggtcggtcgactttcggataaaatcggtcgccgtaaactcttaatgtggaatatgtatatattagctgcttttttctacccaaagtcaagtattatcaatgatttaagaaaataaatttacttgttttaatgatgcgaataaggttaaagcaaataagagtttaaatttaagaaaaagcgaaagtaccacaaataagcctatgaatacttgtagtttttccataggttgcttatacttaagttgattatttgatttcagctaaagtcttttatttttggtggctatgttgtaatcatataattgatcatgtttgataagagcaaacattgtgcgtatcagtttatggactgatgcaatggcgattttcttatagccttggctatttgaagatcgttttttcttgtcataataatcagttatatggcaaggctgcgtagcctttaccgtctccatttgaataataactcgataaagtatttttctggcaatatgattgccatgcttggtaatgccaagagaactgtctttttcaccagattggtaccttcctggatcaatgccaacaaacgcatcaatttgagctgaagtgctaaaccgtcttagatcaccgagctctgctactaatctcactgctgtaattctagcaacccctgggatactcaaatagatggataaagcacgagcgtttactgctttagccagcttttccatgtagttaattacatagtcgcgttcttgctggagtgaaaacaaattagaaatgttcctttgaatagctctaacgataatactatctttggaatcataaggataagcttctctagcaaaagcgtataatcttgtggttaagtaccgtgccctttgttgtcctattccagaaatagaattaagcatttgagttacctgtgtctcattcttttctagaacatatccagcatgtgggaaaagactaacaagcgcccaataaattctgccagatggatgagacagtatttcttcaatttgtgggaaagtggattggaggttgcggtgcaattgatttttagtagtaactatactcctagtaagttcttcataatagcgactggcattctgaagttcatgatactctctgggctgtggatcacgcagcttttgcggggcattaaattgaattaaagccaggcgataagcatctaccttatcagttttattatggcgtaaattattgtccattagctttttcgctttaagcggattaagcttcaaatacttaatatgataatcctctaagaaagcttgcaggcttagagaataaacaccagtagcttcgaaaacaactaaaggagttatcaaatattggttcagttgctcataaagtttttgatagccaaaggaatcattagagattctaaaagattcgccttgtttgatccggtcattaaccacacaaactgtggaagatttactgctaacatcaataccgaaaataatttgtgattccataatataacctccgctgtgaagataaacctctttatcaacctattaattctaattttctaaacacggcatctaagtgcccacagacttcgaagagacttaagaataggtggtaaagcagtccgtttcttttacgacatcaagtgtctaaaaagctgaagacttgatttgctttatcttcactttctattttagacaaaataaaaagtgccagatcgtgaatccgtcgattcatgatccaacactaggttagtatgtttctttattacatctaataaccgctaattttagcttaacctttatcctccgtattggaattggtttaatgattgctgttgactatactgtagggaatgccttgttaaccgaatggctacctaagggcgaagacagcaaacgccagagtcatttattaatctattggacaattggttttattttgtcatatctagctggtagttttatcactggatttgatagttatacttggcaaataatcttagcaacaagtgcagtacctgcactagtaactgctatcttcagaagtcttttcccactccctgcttcaccaggctggctagcaagtaagggtaagattaagacggccaacaaggtcattcgtaagcacatgggacgcaaatggagattacctgcccgctttatgaagcggaataaaaagaaaacgcctagaaatatttcctgggcaattttattttccaagcaatatctgcgacgtactctagtaggtgggattttctatgcctgccaagccttctcatttttcggtattagtatcttcttgccaattttattacaaagcatgaatatcactagtggaaatatctcaggaattatctacaatggtgggatgttcattggtgtgctaatcggtacctggatctttaacaaggttagccgccgcttctatcttatcagtaattttctaatctcaggtctgctaatcggcattttagcaatagtacctaacttaaattcaatacttaaattaggtatttttacgttatttgcgattattttatcagctggtttgatcctagattatccttatccgactgaattatttgatctgaaggtacgagcaactggtgtaggtacttgtattacaatcagccgaatcggggctgccgcagggactttcttattgcccgtcttaactaatgtgggtggtgctagcctggcaatgctagtttgtgcgattgttttactctttgcctttatcgtttgcctcatctgggcaccagagacctcaccccaatttatgaaaaaataaaataattaatatgctacacaaaaagacagattacatatgatgcaatctgtcttttcttatttcttatcttttttcttcttgtccttagaatccttatttaataattcttctggatccttatgcttaggcgtcttctttggatctggtacagttgcaaagcgatcaagcatcttctgtaagttattagggttgtcaaaagttaatcccataaaacatcttcctttcgttttctcaattatattaaaatttcaattcaaatgacaataattttaaccctcattatcaataaattgttgcatcttaatcatttctgaaccagccagatcaacactaattaaatcactataatcatgaacactagtatctcctaaaccatattcagttacaatttttaggtcgaagccactatcagagcgatcttcaattaagcctaaacgatcaggataatgataaattgaatcactaattttcactatttgatcttcgggccaattatcaataatttctgctggtgactgaatttcatcccgtaatttaactgaacgctccagcctgtccggatcaaaactaccattatttttttgccattgaactaaaaaattaaagaagagcaagcgctcggaatcttcagtaatatgcgttatatggctcctagcaatcactgcaattgattcaacctgccctaactcattgatgctctcgaataccagattatcatcgtcatacttgagtactttaccaatagcaaaactaccatattgatcatcaaaggtataatcaaaataaatttcaaccagatccaagtcgttagtgaattcttgcttctgtgattgccgcaaatattgggtaaataagcgattatcaatggcattagtatcgacacaaacaatatcgtcaagtggtataacggtggcataatgctctaaagttaattcattgcgttctaaaatacgcacctcttgctgatcaagttgagtaattaagccagtgtaagtagcacctgtattcacctcaaaagttgtaaagggttgcgtgtcagctacgttaatcagtaaatcatgcagattagtaaaatcccaggctaacactgtcttatttaattgctctaagttaaatgaatccttaacttgggtaatcatataatagcgtagattaggcgtatcgtcttcaatcttagctacttgatcttctttaataaagactattccacctaaattaccgccttgatcgactgattcaaaggtaatccagccatgatgttgcgtgataatgcggccaatatagtaagaatttgcatcaactaccgtaatacttgcatccccatctaagttatatttttcttgatcagccttaagcgtgatttgtacaagtttattcaatttttcgccccctcttttttcttccgtgaatttaattgtcgcctaatcattatttttctgcaagaaaaaagaagatggtttagccatcttctaatattgagttaattctgtagaattttggggctaacgaatattacttcttttgtgcagctgcctcagcttctgctgctgtgtttgaaggggttaacgaagtactgtttggatcaaaacgcacatcgcttgcttttacataaccatcagcaaattggacttcaccttgattactatagacagatttaccaactaagtgataaaacagttctgccttattttcacttggtacccagatgtaaagcaacttatttaccttgtatcttccaccttgttttctaacttgatcgcccttgaagtcaatcttgtttccgttagcatcatagatatcagttggcttaataaattgaattagtgattttttagtatgataataattttgaactggaatatctttagcagctttaacattgaaattataaatccaataatcagttcccttaatatgatagattgctaattcgttgtcatcgtcaccatctctaccagtatcagcacgtgtcccttgctctaaacgatccactgtaaacttatcaccttgttttgcgtattttcctgaaggctgaactgcatctttatcaggtacttcaacaaaaagagcagcacgtttatcagttacagtaacagtcgtttcttctgatttagttgtttgagacgaagaagaactagtgttgttatttgtattaacactaattacaggacctaaattataagacttaatgtactgtttattaggtccacctattctaaagtaatgctttccgttcttaaatttgtatgaaccgccataagtcgtgatagtttcacccttatacaatttccaacggttattgtaagaggttctgccagttgaggtacgataaatgtaagtattatgagtaatcttacgtgttacaccatcaatgttggtagcctttatgtattgatccttgccgcttactttatagtaaagcgagccgtcaatttttacagggttgctttcaacagtgacatattgataggcattgtattttacacctgtgctgttaccatccttgtcgtaagctaaagcagtatgcataactgctttagtcgtagcagcttgtacttcattagttgtattagtcaaaacagccaagggtgcaactgtcattaatgtagctgcagaaattaatgcaatcttatttttcttcatcataatcatccttttcaaatctctacactgctattatattctctaaagctaattaaagcattaaaaagaagcccattaagtgaagtggacttctacttttgatattttcttttaatttattttttcaatgccgttgcctcagcttctgctgctgtgtttgaaggggttaatgtcaaacctatattaacaaatttaacatcactagctttaacataggcatcattaccgacttcaatttgatcaacgttacctgtagcatagaacttagtaccaactaaatggtagaataattctgccttgttttcacttggtacccaaatgtatatgagtttatctactttcagatttccaccttgttttacaatttttgcgccattgtggttttgcatagtaccgtcagcattatacacatcagtatccttgacaaatttgatatagccataatgttcgtgatcataatcatgctttactaattttttatcggcagttacatcaatagctaaaagccaattgtctgtaccttttattctatacattccagcttgtgctgcagttgatggaaaatgatcagcaaacggagtaacttctagtttatctacaataaacttcgtaccagctttgagattctttttgattgctttaccttgattatcataaatatttacaccgtaagcattttttacggtaacagttgcttcctcggcattagtattagtagcgttgtttgattcattgctggttaaatttgatgcagtattagtactaataactgggcctaaattatatgatctaatatattgcttacgtggcccacctactctaaagtaacgtttaccgtttttaaatttatatgatccaccatatgtagttacggtttcacctttataaaatttccatttcttactgttggcagtcataccataaggtgtcctttgagtagaagtccggtatatataagcattatgagtaatctttcgggttacaccatcaatattagttactttgatatattcatctttatctgtaactttgtaatattgacttccattgatagttactagttttggatctacatgaacactaccataaacgtaatatttatgaccggtactatttccatctttatcataagctaatgcgttgtgcataatagtcttggttattgaagaatctgcttgtactgtatgagcgctagttgtagtactcaggataggtgccgttcccattaaagctactacagaaattaacatgattttattttttctcattattaaccaccctttgaaaatctctatacttcaattatcttactttgtataaacttagacaacaaaaatagcatcaaatcatattgatttgatgctattaaggctaaaatttacaaatttagtcccaagctaattcataaaccttatttgaaacagttttatttttaccgttaacattagcatggtatgcaacagttaagtaaccgtgattttcatcaataatttggatactttcaacttcactatgttcatctgaaatatctaatccaccaaatgcacttaagtttacattttcccattgagattgatcattacgtgcataaaacggaatttttacaatttccttgtgatagtatgaccatgaaccattacttaaacttggtgatttttgactagtaatataaatattaccagaattatcaagatcataaccttgtacagagtttaaaacagatccatacaaaccatatactgtaaaactagtttcacattgataatttcccatatttacgaaaccattatttccagcctcatctaatgcattattaatgacatttaggtcataaattgaaaagtggcctgttccattattctcaatagtagcaattaaaagcatactataatctggtgaaactgctacttcagcgcgttccatttcatcaccagagcattgatcttcaggattacctgcgcggttcaagtatgctaaacgtgggaattcagtatttgatgaagcatatgatttgtatctaatatctgctcgagcaatttgagaagcccatttattcttgtttttagtaccaacgaaccatttaccagatctacctgaatattcccaagtttgggtgtgtccagctgctgcacctactaaagtaagcacaggggttgtcacgttgccacggaagccacgcaatacatgtgtttctgtctggttatttcttaactgtaaaccataaacatactttgatcctacattacctttttgaactacagctctgtaacctgtattcatatcgaatctatctaaaattctaatatttgttgcatctaacataataaaacctccgaaaaatttaaaaactactacttatcctgagtttgctcattcatctgtttagccacttccgcaaagatgtcctgcacttcttgcctgttcagcttgaagccttttgcttcaaggctgttcactactgcgttgccaacacggttaatcttctgttcgtcagaaagattttctttgtcgtataagcgtacatagcttttcattaagctatctgcagtattgcggaattgctctaagcgtttattcttgaaatgaactctgctcaagatgccaatacctactacgctaattacccataacgccagagtaatcagctcaacgtaatcatgaatatccataattgaatgaatcacctctcttttgatcaaacgatccaagggggctaacgaatgtccattggacttcacctctgtttgataatgttcaacaagacactaatacacttgatttatattagtttttagactaatataaatgtataagaaataaccgaaagctggtaaatgttccgccaagaattttattaacttaggttgttttctttttcatatctcgttgacaatatttactataagttaattaactaattatgtcaataaaaaaagctaaaaaactattatttttttcgaacaagtattcttgaaaggcttggtatgattgagttagagcgcacaaaagaattagcaaaaaaatacaaaatgaatctccgtgaagtaaatgacaaggcaggtttaggtagaaattccatctataattggaagaatcaaagaccaggaattgatgcacttaatgcagtcgcagatgtactacatacgtcagccgattatttaagtggtaagacaaacaatcctagcccgtcacctaaaggtgatgaaactggtggtatttctattgatggtgaagtaccatatttctatcatggctacactattccagaagactacctgaacatagttcgtcaacttatggaacgtgatatcaaaaaaggacttattaaacgacatgacaacagcagatcagaataaacaagaactcatagactggttattagcctatgctaaaaaacgtgatattatggttgaattagttgaagtaaatccaacttacccatccatttctttaaagaactatagattcgctgtcattaatactaattggcatcatcaagaagaagtaccattttcaataggtcatgagattggtcacattatgctgactaatggtgaagtagattctcgtcaatatatcacttttacagaacagaattccgaagaaagtccagcagacatcttttcaataaagctaatctataattactcctgcaaaatgggtgattgcttcgaagatacaggtttatttatgcaagcatacgggataccaaatcgagtagctgatgcaactaaagagatatttaagcgagcagcttaaccatcaacttctatattgatttgattactaaaagttttagcattagtttttacactacttaaaatccaattaaacaaaaaatcgctactcaattgagtaacgattttttctatccatccagttcaacgccttgcaagtccttcatcttgctataaaccgcgccacgttgacttgaatcaaactccagaataagcatatctccgccgcgaattacggtttgaccatttggtatgatctcatctccatcgcggtgaattgttcttaccctagtatcaaccggccattgaacctcagaaatggttttatcaaccagtctactgctctcatagaccggcagagccattgtatcagcctgaccagtatagttagccttatggtcactactcttgtccatagcggctgctagaagcccgtagataggcttaccgccaagaagttcatcaactaataacgcaatgaaggccaccacagctaatggcatcaagtgaagtaaggaccctaccatctcagtaattaagataatcgccgtaaatggtgcacgaatgattgctgcaaaatatcctgccattgaaaaaatcactaggttaactactaaacgctgcggtaacaagcctaactgtaccatcatcagtccataagttgcaccaatcaaagcgcccattgtcaaaattggcaggaagataccactaggaagacctgaatcataagcaacaatggagaaaacaattctcatgacataatagaaggctagcatccctacaatgccccaacctgttttagtgattatattcggcaatgccagaattaaccgattacctggaccggtgattaatggccaaaagtaagcaatcgggattaatattgccaaaggaataagtccatgcagccaacgaggtaaaatggtgattttagcatagaccttctttaaactaaataaaccaactttatataaatgacccaataagcctaataaaatccctaagataagcaagtgccagtacaacgaaatcggaaatgaatagttatattgaattgctagggcgtgacgaatgccaaacaagtttgaaacgacaaagtttgaagcaattgcgccagctaaagcattcatccaaactaatggtgaaaagttatggaatacttcttctaagacaaacaaggcaccactcaaaggagcgccaaaagcggcagacaaaccacttgaagcccctgttgcaagcagaattctagtttttaatttgttctgcttgcatccctgagcaacaccttgaccaattgtcgagcccagctgcaatgatggtccttctggtcctaggaatagccctgtgccgataaccaagataccaccgattaatttccgccataaaattggaaaccattgtagtgatagcttcccttgcagttgcaattttacttctggaataccagaaccaccaacatggggatattgtttaacaaaataaccagcaattaccgctaccgcaataaagccaatgataatcgcaataaaccacaacggattctggtgcgctaattgaaacaagtataaccaaaaaccagatgtcttttcgattccaaatctaaataaaccaactactacgccggtacatattccgacaagtagtgcttggagcaacagtttaatattagttctgtttgcctcgtctttcattactttctccctcacaataaaaaaacgtgtcacaaactattatacaacaaaaagccagctagaaatgttctaactgacttttttgtttcatgtgaaactaattatttttcttcataccattcggtgtggaagacgccttcacgatcatttctaaggtaagtgtgcgcaccgaagtagtcacgttggccttggatcatattagctggcaagtttggattaaagattgattccaaccagttaagagctgcgctcaaagttggagttggcacaccacacttagtagcaaattcaactgacttacgcaaagctggcaagttttccttcatcaagccgcggaaataatcgtcttggaataggttcattagcttgccgttcttgtcataggctttttcaatatccttaagcattgcggaacgaatgatacaacctgcttcccaatcttgagcaattgacttgtatcttaagtcccaatcataagcttcagcagccattgtcaattgttggaaaccttgagcataggcaacagcttgggctaattgcaatgatttttcgaatacgtcaaccatatcatcaggaatttcaccattgtattcaaacttagttggtttaacgcccttttcaattgtcaagtgtgcttgcttactcatgaaacgtgccattacagcctcggctaccaccgttacaggagcgccaagtgcaacaccatcttcgagcatccagttaccagtacctttgtatgaagcaacgttcaaaatgtgatcgattacgtgatctggcgttaaatcatctttttgtgccaaaacctttgaagtgatttcgctaagatatgcttctaccttaccatgattccatttatcaaaaatttctgacatttcatcatcgctcttgtgagcaacgtcacggagtaagttgtaaacttctgaaaattcctgcataataccgtattcgataccattgtgcaccattttgacatagtgaccagcaccttcaggtcccatgtagtagacacatggcttgccttcagtattcttagcggcaatagcttcaagaattggagcaacttccttataggctggttcatcaccacctggcatcaaagctggaccattcaaggcaccctcttcaccaccggaaacacccataccaataaaatgaatgccgtgcttttccatttcgtggaaacgacggttagtatcgtgataatttgagttaccaccatcgattaaaatatcgcctttatccaaaagcggcagcaatttttgcaaagtttggtccactggatcgcctgccataatttgaatcaaaatcttgcgtggcttttcaagtgagtttacgaactcttcccaggtgtagcaaggctttaatttatcatcttcatattttgcgaaagcatcaacttctggtttgtcgattgagaaaccggaaacggagaagccgtggtttctaacattcaaagcaaggttcttgcccataacagacaaaccgataacgccgaattgttgcatgtttattaattcctccattaatcaaagttcatcaagtattattatacgttctagcacgcaaaaaagcgaaaccaaaaggttccgctttttaaaatctagttaataatttttttgttattgggtaaaggtgtttcacacactgctcggtaatatttcctaggaaatattacttttattgatcaataccccaaagtaaaatgttaaatgctaatggtagtgttagcttggtaatgtatccatcctttttagcctgttttaaagatgctagaacaaatttacgttgttgacccgttagctttttggctactttaacagctaaattaaagtcatactcgttttttctaatagcatttttgataactatctttgcccacagaaataggttgagaatcggagtttacagttacaatgtagctccacttgctaagtcgaggaatatttttaattgttatagctttatcaaacttagctactgcagttgaattgctgttgtctgcagcgttggcagtgacagacgatgctgaaaataatgctgcaagtaaagcagtagcaagtaaactaattagagcttttttagatttcataatttagcatctttttacacatagtgcttattggctaataagcattaattcatatccaacactgtctattataagcatctgtattctatttactagccaacaaactattttatatttaaaatcgtatataaaatgaggctatttcccaggaaatattttcccatacaaaaaaagcgggacaaacgtctcgcttctttataattactcaaccaaattagtgttgtgaagcacctgaaaccgtatcaggagcaggatcctcttctggttctgattcttcatgttgagatgcacctgttgcagcgtcagcttctaagccgtacttttctgcaaagtaactgaatggcttcaagtcttcagcttgatacttcttgacaaaggctgggtcgtcaagtgagttcaactcagttgagtaaggcatttcgtgagtgtacttgacgtcgatcaacattggaccgtccatcttcttgaattcgtcgacagcatcttcgaattccttcttggtgcgaaccgttacacccttaacattcataccttcagcaacctttgcccagtcgttatcagggataataacaccagataatggttggtgagattcatcttcttgttctgcttgaatgtaacctagtgtttcgttagtaaatacaatattcaaaacatgcatgttgtaacgagccatagtaagaagttcttggttcatcatagcaaaaccaccgtcaccagctaattgccatacttcacggtctgggtaaacagttgctgcagtaagagcagctggagcaccataacccatagttgcgtgcaagcctgaagtagtccacttttgatcatcatgcaagttcaaaagacggcatgagtcaacgttaacgttaccaacatcaatagcaaagatggcgttgtcatcagccttcttgttgataacatcccagattggttcaggacgtacaggcatttcatctgagttcttaaagcttgcttgccatgcatcccagttctcacggtctgcaatagcagccttgtaaagtggtgattcgctacgttcttcaccagcgtcaataattgctctcaaagccttcttagcatctgcaagcattgaaacatcagttgagtgacgcttaccaaacttagctgaatcaacatcaatttggataaccttagcgttcttagggaaccataaaactgagaatggtgagttgttacctacccaaacaactaagtcagttgcgctttggacttcttgagcagccttaggtccgatacggccgatagtacccatgtatgctgggaatttgtcttctactacacccttgcctaagtatgatgacataataggggtcttgaacttttcagcaaattccttaacttcttcaccagcatcctttgcacctaaaccaatgtacatggttgggttcttagcttctttcaaaagcttaacagcttcttcaactgaagccttagttggtgctggataattgtctgctggatgagcatccttgtttacacggaaggtgtcatcaatcttttgccaaccgtagtccttaggaataatgataactgcaggaccctttcttgcgtaggcttgacggatagcttcatcagttaaaattggaatttgttcagcggtcttagcttggcggcaccaaacactagcgttcaagaaccacttgtcttcatcaaaagcttggaagaagtcaatatcttgacggctagttggaacgttagcaacaattgctaccattggagtcttgtcaaacttagcatcatacaaaccattgaataagtgggcagcaccaggaccagctgaaccgaaacatacacccaacttaccagttaacttatattctgcagaagcagctaaagcaccagcttcttcgtgacgtacttcaataaatttcatcttatctctaaagtcatagatagcgttcatacttgagtcgaatgaaccacctgggaaaccgtagatatgatcaattccccaatcgtaaataactttaagcattgcatcagaaccattaatttttgtcatataagtgcatctccttaacttttgttctttcataatgtattaaaacactttttttcacatttgcaaaccgataaaatcaccgttattacgcaaatgaaaacgcttttgtaataataatcacttcacaagctttaccaaattcaatatctcaaaaagctgaatggtagcgttttatattgtgatttgatgaacattattatactaaatttcacttattttatgtatattcattgttacttatagtaaaaatttaagaaaaaattttttacaatttatttcatagctatccaatttagaaaaacgttattttataattttgcgcataaaaataacgtagaatactattcctacgctatttttgtgctattctactttttcactctagagtaacgcccatttttaatgtaaacactcaagattgccaagtcagctgggttaactcctgaaattcgttctgcttgagctaaagtttcaggacgaattttttcaaatttttgccgtgcctcagtagctaaaccttcgatttggtcataatcaatatctgctgggatttttttggcttcttgtctctttaagcgagcaattctggtttcttctttcttgatatagccagcatacttgataccaatctcaacttgttctttaacgtaacgatcgcctggaactttttcaccagttaaccgttcaatatcagcaatagtaacattagggcgacgcaagaaaacatcggccttaacaccggccttcattggttcctgaccaatactttgcaaaaattcctgcacctcatcagttaaatgaaccgtaatttcatgcagtctcgtctttgcatcttcaatcgcatgcttcttttcttcaaatcgtgcgaagcgttcgtcagaaattaagcccagatcatgaccatattcagtcaaacgcaagtctgcgttatcattgcgtaaaatcaaacgatattctgctctactagtaagtagacgatatggttcattcgtccctttggttaccaagtcatcgattaacacgccaatgtaagcatcgttacggcctaaggtaaatcctggcttatcttgagcagataatgccgcattaattcctgcaattaaaccttgaccagctgcttcttcataacctgatgttccattcatctggcctgcagtaaataaatgctttacgtttttggtttccaaagtatgcttcaattgccatggttcaaccacatcgtattcaattgcatatcctggtcgcatcatttccgcatgttctaatcccgcaacagaatgaatcatctttaattgaatttcttctggcattgaagttgaaaagtcgcctacataaacttccttggtagtctttccttctggttcaaggaaaatttggtggcgatccttatctgcaaagcggacaactttgtcttcaattgaaggacaataacgtgggcctacacccttgataattccagagaacatcggtgcacggtcaagattgtttctaataatcgtgtgtgtggttggattagtataagtcatccaacaagaaatttgtttttgtaaataatcttcatcacgactttcatatgaaaagtgccgtgggattttatcaccaggttcttcctcagttttagaatagtcaattgtattgccgttaacacgtggaggagtaccggttttaaaacgacgcagcttaaaacctaacttttctagattttccgacagcttaattgaaggagtagtgttatttggacctgaagaataagtcaattccccaataataattttaccgcgagccgctgtacctgtagtcaaaacaacgcttttagcatgatacttcgcaccagtattggtaatcacacctttgcagacgccatcttcaactaccaattcatccacgatagcctgacgcaaggtcaagttgggcgtattttcgatcgtatccttcatgtgttcatgatattgccacttatcagcttgagcacgtagcgcacgcacagctggccccttacccgtatttaacatccgcatttggatataggtagcatcaatgttctttcccatttgaccacctaaagcatcaatctcacggacaactgtccctttagctggtccaccaacagatggattacatggcataaaggccaccatatccaaaccaatcgtaaccagcaaagttttttgtcccatgtgggcacttgccaacgcagcttcacatccagcatgcccagcaccgacaacgattacatcatattcatttgaatcatatgttttaaccattttcatcctactttcctaaacagaattgactaaataattgcgtgattaattcatctggggcactttcaccagtgatttcacctaaagtatcccaagcaccagtaaaatcaatttgtgcaatatcaacagggacgccatcttcaactgcttgaattacatcttccaattctttcttagccttatgcaataaggaagcttggcgttgattggttaccataatttgatcattagaattttcaatcccagcaaaaaatagcttattaatcaattcttcaagcgcatctaagttttgttctttcaaaatcgaagttgaaataacatcactacccgttagtttctccatctcagtagttgttattttttgacctaaatccgacttatttaagatcacgattcgcttcttgtcctttgttgcttcaattaaggcttgatcttcagctgttaatgcttgactagcatcgattaacaacaagaccagatctgctcgctccaaggccttttttgatctttctacaccaattttttccaccttatcttcagtgtggtggattccagcagtatcaattagctctagcggtactccttttacagacacatattcttctaacgtatcacgcgttgttccagccacatcggtcacaatcgctttgtcgctttgagtcagataattcaataaagaagactttcccacattaggacgaccaacaattgcagtagccaaaccattgcgcaagatttttccttcttgtgctgtcttcaataagcgattaattttatcaattactgatctagatgtgtctgccatctgttttgcggtaacagtatctgcatcatactctggataatcgatattaacctcaacgttagccaaagtattcagaatttcctgccgcattgcctgaatcttgtgtaacaatccaccagctaattgaccaacagccacttgtcgtgccttatccgtcttggcccgaacgatatccatcacactctcagcttgagttaagtcaattcgtccgttcacaaaagcacgtttagtaaattcaccaggatcagccattcgcgcaccgtgactcagcaacaattgtaaaatatgattagttaccacgattccgccatggcaattgatttctacaatatcttcacgtgtaaaggtcttgggcgcacgcagcactgtcaccattgcttcatcaatcgttttcccagtatccggatcgataatatgaccatagtgaatagtatgtgtcggcaccttgcttagatcttcgcctttaaaaacctcatcagcaatcttaattgcatcctcaccagacattcttacgattgaaattccgccttcaccgatgggggttgaaattgctgcaatagtatcgaactctgtcaaagtttgagccataattcttcccttttctcaataaaaaaagcgcattataccaccacgaataaccatgatggataaagcactttgactactttatctaaaaatcattttagactaatattcttttatttctttttgcgtcctaaacgcttgtaagcccttcttagtttacgtttgcgttcacgctcagcctcagcctttgcttcttgctctcttctatatttaatagggttttgcaagataaaggtttgaagcgcctggaacaagttggaaattacccagtaaagtgtaatagctgactggaagtttaaggccatcacaccaaccatgatagacattccgtacatcattactttggtcattccattttgcgatgattttggcgtcgataattgactaatatacgtcgataagaacgtaaagatcattgctaaaataggcatgatgtaatatggatcgggcttgcttaaatccatccataagaagcgcccagtttgtaactgcggtgtacgtaaaatcgcaccatacagtgcatacataactggcaactggatcaggacaggcaaacatccagtataaggatttacgcctgcttctttataaagcttgttagtttcttgttgtaataatgttcttgattcagtgtcacgtcctggatatttcttacgcaactcattaatttgtggttggatgctttgcatcttagtagtacttcgaattgaaatagcattcaaaggtactaagatgacacgaacaatgacggtgaagacaataattgcccagccataactgttccccattaacttagctagccacaaaataaaagctgacatgtaataaacgatccaacggtcccaccaattaccacttgtatgtgagattggcgttgcttgaccatttgctcccgtagtagcacatcctgtcaatacaacagcaagtattgctactgctaagactgcaagaagacgtttgacatttctcttggtcagaatgtccttcaatctatttttcctcaactttatctggcatttcttcaataatatgagctaacgataatgcgtgaagcaagtttttacgcacctgagccatattaaaatcgcgagcataaggtcgcgtaatgactaaaaaatcaacatgcggattaatctgcaatttttcttcatcaatcacggcccgaatataacgcttgagtcgattacgtgcgactgcggtatgaccaacctttttgcccacagaaattcctactcgaaagtgtttattttctgttttttctaccttataaatgacaaaagctcggttagcgactgagtcgccagattcgaaaacttgctggaaatctttttcagattttactcgataagactttctcaaaacgtttcattccactctagtagactaaaaaaaccactgggattcagtggtttaagcagataagacttttctaccttttgcacggcgtcttgctaaaaccttacggccatttgatgtgctcatacgcttcataaaaccgtgaacacgtgaacggtgacgcttcttaggttggtaagttctcttagttgtcatattaaactgcacctccataaatttttgtgccaattgcacaatttcttattaaggatagcacgaaaagccataaaaaccaagtattttaagaaaaaaagactcctgaattgtcaaattaagtgcaacagttaggctatgaaggaacgtattgcttgaagagttcttctgctgtgtgatattggaggattcgacgatgtttgcggttaatggcatcagttgcctgttgaacataagcagctgacttatctttcatgcttttgcccttagggaagaattgacgcagaagtccattgcagttctcatttgtgcctctttcccaaggagaatatggatgagcaaagtagatctgacatcctttgattttggtcatatccgcaaactcagaaccattgtcaaacgtaattgatttaaaccaattaggatgtctgtcaatctccttttgaagcagtctttgacaagtactggcccgatagtcaggaattttgataacaacctcaaaacgagtggttctttcagtcagtgtcattaaggcaggttgatttttacgtctgacgcctttaaccaaatcgccttcccagtgcaggggaacttttctgttttcaacttctttaggccgctgttcaatcgaattgccaagattctttttatgcggagcatggccaccatgactatgatggcgtttgtttctgcgtcttttaagcttcattggcaggtcgatattgcttatattccagcaatccttgatcaatataacgatagacagtgggcgtgctaggacatggataatttggcataatcctgtgaaattcaccaacgaattcatcaatgctggtggcatcaaatttggctttaaagcgtctgcttagcattctgaaaaagacggcatagtgttgcagtggattacacttatagcagtttctgcgacgcttctcataataaatctgtgcagtatcagcgtaatagtgctcatacaacaaatagctgctgtctctttgcaggacactgcctcgtctaatttcacggctgatagttgatttatgacagcctacttcttgagcgatagcattgcaggaggttatgccagaatcaagcagagcttgaatttgtccacgttgttcgctgttcaattgatgataatgcttggaaatgctagaatttgagttggtcatgaagatcttcctttcttgatttttggtcacttcaagtttaggtcttcatggcctttttgtttaacacttagtgttgcacttcaattttaaatccgggagaaaaaaagacttttaaatcccgtgaatattttctaaaaattgattgtttttcatgtggataaaaaataaaatatttttcttacgtataatttccacaagataattcccaacgttttccacaactcacatggtgttaaaaacttaattcacaccatgtggataacgcatatggtattttacctcaagtattgatagaatagtatccataattcacagctgtactgtgcataaattaacagttttgctcttatcatgtcaaaatgtacatatcactttaatagttatcaacaggctgtgtactttgttgatttctttttcacctgtggaaaaccagttaagtaaatggtaaaataaatttgctttttactaactgggggaatgtaca

SEQ ID NO: 2 - DNA, 10607 bp, Lactobacillus crispatus
  source 1..10607: mol_type = other DNA
atgacaaaatcaacaaatttcaattactatgaagccgataacgtatatggagccttatttttccagtttcctaaggtattaatgtatggcgagcaatataaacatttaagcagtgatgctaaattggcttatatggtactgaaagaccggctcgagtattctttacgcaacaactgggttgatgagcaagggcacgtctactttatttttaccgttaaagaattacaagatttatttaactgcgctactgaaaaagccgttaaaatcaaaaaagaattgcaaacagccaatctattaaaacaaattcaaatgggatttaatcctaaaactaaaaagaatgaaccaaatcgtctatacctttctaaactcgatgtgaaagctactgatgtctatttaaggggcgaatatgggcaaaaaaagccggaatcccttactacgagcggaatttcgaaaatcgaaagtccgcatgacttcgttgaatcccttgctacgagcggaatttcgaaaatcgaaagtccgcatgacttcgttgacgacaaccctcaaacccttgctacgagcggaatttcgaaaatcgaaagcaatctatataaagactataaaaataatatagatactaatagatacgatatagatactcaaaagttggacttttccacaactaatttttcaccagctgaaattgaagcccaaaatcgagatctagtaaaacatgctgatgagttcttaactgacgaagataatgggttgccggtcttcttagaaccagaagcagttcaactacttagcttttggtgccgtaccccacaacaaatgcggcgctttattggcattatcttaaacgccaaatatgctgttgaaaaagagcataaggatttaggcgtatggattctattagacgatcctgatttaaaaaaaatgatgaccaaaacattaagacgctattttaatgctctaagaagcgacgagaagcatatcaagaatgttgagaactacctgtacggcaccatgcaaaacctatttggtgtttggtggaaccgacaagcagctagagaatatgcggccaaacaccccgaagaacagaatcttgatggcgagcgcgcttgggactaaaacgccatataagcccatttaagccacttcaagtgttacgcatatattttactaaagccactttaaaatcgcttagaagtaaaaacagataccttgagtgggcgaattggcgatagctaaactagaaaaatgggataggcgctttttaaatgaccaaaccaagcaaagaagttgaaaaaaaatgagcaattgttggctgacccatgggcagtcgatattcaagacatttgggagcaagcagcccaaaatcgagatcctgataaatgcaagctgtttgacgcgttatacacttacctcttagataaacgccaagaacaaatcatcaatgaaaagcactttttgatttaacatagacagttcaaataatcaatgattgaaataaaaaggaggcacaaaatatggctaagacacgaacatatatggacaagtatagattcacaactgcggaaaaccaacggtttgcccgagcaaattttaccaagttagtgcatactaatgctcgctttgaaggcgttaataccacattgccacaaacacaaactattatggacggtatgagcgtagcaggagtacctgttgaagatgttttgacgattgttaatttaaagcgtgggtggcaatatatcactactcaaaattcccctttaacgttaaccatggaaaaacaaatcaacaaaattgtggcagcagaagacgccttagtaccaggagaattacggcaagggaaagggggagttaatttaggtagtgaagacttttttgagccgcctttaattaacgaaaaacaggaacaatcctttttacaaaaaatcttgactgatccacgaacgacgattactgataaagcattgactgtcatgtatcataatatgcgtcaacaaatcttttgggacggaaacaaaaggacggcaactttaagtgccaataaaattatgattgacggtggcgctggtttaattaatatcccattagataagtgggatcaatggaacgaactaattgccaattattatcggactaatgacatgactgaagttaaaaagtggacatatgataatggtatccaaggattacaaattcgagcaaacaaaaaattaagtgttaatcacaagtagtaaattatgtatttaatatatctaaatatgcctattaatgatataattgaccgcaaagaaagcaggtctatttttatgtcaagaatttataaagttggcgaagctgctaagcttctcggtgtatctcgctctaccatgcaaagatgggatcgagaaaaaagactagttgctcagcgcaatgttgccaatcgcagatactatacgcaagagcggctggatgcttttaggggcattaagcctcaccgcaagacagttgcttatgcccgtgtttcttctgtaggtcagaaagaaaatcttaggcatcagatggctttcatcattgaatatgccaatgctagaggcatcattattgatgaacatgtagaagatattggatcagggcttaattataaccgcaaaaaatggaataaattattggatgaagtagaagcaggaaaaatagaacgaatctttgttacctataaagatcgttttgcccgctttggctttgattggtttgaacatttttgtgctaagcacgatactaaaattattgttttaaacaaccctgaaacctctccagatgaggaaatggttgaagacttaatttcagtaattcatgtgttttcatgtcggctttatgggttgagacggtacggcaggaagattaggcgggatttaaagaaggaaggtgaaaagagtgatcatcaaaaccagaacatatcgattaaaacccaatcaaaggatgaagaaggttcttgattcgctttgtgattacagacgcttcagctggaatctcggtttagaaacctggcaaaatatgcatgaagccagacaattggctttaacccagcatcttaaagcagaacttaaaaagcctagaaaaaaacaaaagcttacaaacgctgaaagagaaattctcgcaaacaatcctgtcccttcctggcgcagaattcgtgatgagctgactgaaaacaagcaatactggcagacaaagcttccagctcatgtctttaatttggcgatccaagacttaggcaatgcttggcagaatttttttgataaagcgcagccaggctggggaaagccaaaattcaagtctaaaaaagcacctaggcagggatttaaaatggatcaggccaaaattaaggatggctgcttatttttagaaaagcctagggctgtcaaagaaacatggaacggctttaaattaagctctgctccattgtcggatgatttcggaacaatcagcttttacaaagaaaaaaacagatactatgcatccattccttttaaaatatctgatccagaagacaagcctaagacaggcagatatacaggcgtggatatcaatgttggacatttcaattacagagacggtcaatgcatagtaatgcccaaatcgttagcagcagtctattgcaaaatcaagcattatcaaagacagctgtctaaaaagcgtgtcgtcaatggtaaaatcaaaggaatgcaaagcaagcgctacatgaaagcgagaaacaagcttcaagcagcttacgctcgtgctaaaaatattcaaaatgatttgatgcagaaatttaccacaaagctggttagcgaatatgattctattgtgattgaagacctaagcgttaaaggaatgcttatgagtcatgttgcctccaaaggaatgcacaggtcaatgtttggcagatttagacagatattgacttataaatgcgaatggtatggcaagaaattgatcgtagccaataaactgtacccttcaactcaaaggtgcgcagcctgcggattagtgaaaaaaggcgatgaaaaaatcactttaagaggcaataagaagcatggcaccaagcataatgaatttgtttgttataatccgaactgccgtaactataataaaaaagttgaccgtgacgaaaacgccatgctcaacttaataattctggtaaaacatccagaattaaataaagccttataaaaagaatgcgggcgaagctacgtccgaaaaagaagtcaaaagagtcggtcaatgcgattactcccaagttggaatatcggaaaactgatgaagacgttgataagaaaagcataggcatgttaagccataatgactacaaataaatacaatgtagttgtttgcatatgtttttcatagctgctaatgaattgaaccagatgtacaagcaactaaaaaaacggataaattagaacttaaattagttcctgaattgtcaatttaagtgcaacagttaggttatgaagagatatattgcttgaagagttcttctgctgtgtgatattggaggattcggcgatgtttgtggttaatggcattagttgcctgttgaacatatgcagctgtcttatcgttcatgcttttgcctttagggaagaattgacgcagaagaccgttgcagttttcatttgtgcctctttcccaaggtgaatatggatgagcgaagtagatctgacagtttttaattttagtcatatctgcaaactcagaaccattatcaaaagtaatagtcttgaaccaatctggatgctggtctatttctttttgaagcagtctttgacaagtacttgctcgataatctggtattttgatgacaatttcaaaacgagtagttctttctgtcagagtcatcaaagcaggctgatttttacgtctaacgcctttaacccaatctccttcccagtgaagaggagttgctctgtcttcaacttctttaggacgctgctcaattgaattgccaagattctttttatgcaaagcatgcccaccatgactatgatgccgtttgtttctgcgtcttttaagcttcattggcagatcaatattgcttatatctagcaaaccgcgatcaatatagcgataaacggtaggcgtgctggggcaaggatagcctggcatcgtctgcttgaactcacccacaaactcatcaatgctggtagcatcaaatttagttttaaaccgcttagacagcattttcagaaaaacagcataatgctttaactgatcacgcttatagcagttcttgcgtcgcttatcatgatagatctgcgcagtatcggcatagtaatgctcatagagcagatagttatgatctctttgcaggacgctgccacgtctgatttcacggctaattgtcgatttgtgacagccaacttctcgagcaatagcggaacaggaggttatgcctaaatcaagcagagcttgtatttgtcctcgttgtacactatttaattgatgataatgtctagagatgctagaatttgaattggtcatgaagattcaccttccttgatttttcgtcacttcaagtttaggtcttcatggcctttttgtttaacacttagcgttgcacttcaattttaaatccgggtccctgaattgtcaaattaagtgcaacagttaggctatgaagagatatactgcttgaagagttcttctgctgatagcgctgaaatttcaaatagaattaataccgataacgatcaggatcaggatcagcaaggtgataatgcggaaacaaattttgaatattccgatgatcgtgatggagatgaccaataaataattaaaaaaaggagtagacaaaatagcattaagtcagaaattagctttgaataatgattttcaaaacaaaaaagccctgctattatgcagagccaccgcgcgttcgcaagttatcgtcttgctgcgcatgcatccatgatcattggacgcgacaattttcctacatgtattataacatgctaaaataaaaatgcatgtcattcatgcacattctagggttggctcaatcaaccaccctataggaggtgagagacgttggacgacatgacaattttcctaatttgcgttctgctacatgagctccatttagttcttcgggaactaaataatctacttgataagtagtcatcattagtagacgcgaccagagtcatcggcagttgtatagtcggtgacttttttattttgcattctttaattctctaaagcgtcgataaattggtgttttggagatccctaatttcttgctgatttcagaatagctcctgtatgcaacctccaggcaaaatcaatttgttctggagtgtactttcgaagcataccatcatggaggttggtattattagctttcgctcatgccttgttttcccaagatgaaaaagtgcgacagatcaacgcttttttatttttttggtcaaattttagaaatatgctaaataaaaaaagcggtcaaacgaccgcccacgttttgcatgcctcgttcatgtcgacagcataacactaatcctttaatcattataacatgataaaatagttatggcatgcttttgtgcccctacactgctgtaaaaggctagaaaggagctgtatcatgtcagatgttgtaacactaatcctaacaatcgcacttttgaatgaattacatttagtccttcacgaactaaaccagctattaaagcactagtgcaaaaagtcgtccttcggggcggcttttttgtctcttaactctctaaaacgccggtagatagttgcttttgacatacctaatttccgactgatttcagaatagctcatgtggtcttgagtatggagcttccacgcaaaatcaatttgttctgaggtgtactttcgaggcataccatcatggaagttaggattattggcttttgcccatgccttgccttcctgggttcggttcacgataagatcacgttcaaattctgcaaatgcactgaatacagtgaagattagacggccacttggtgaattatcaatcgtaccaatatttaagacgcgtagaatgattccctcagcatttaattgtttaacaatgttcaatgcgtcctgagtattacgtgctagtcgatctaatttggtgacaattagggtatcaccactaccaatttgagccatcaatttatcgaattctggtcgatttgctgtggtgcctgtgtatttatccttaaagattttggtcgctcctgcctgttttaggtcttcaacttgagttgcatagtcctgctgagtagttgaaacacgagcatagccataaatggtatttgtcatatatttcctttcaattatgaatacaagttatgaatatggcttatgccctatcttagaagattctacttttgtattcaagactttcaacttttgattacaaaacaaaaagcagtttctaaaaagaaactgcttaagtattattattttcaataattaccatttaatgttagaaatagaagatcaaaagtagagaatgaaaatgtaaaagtaggagtagagaataaaaatgagaaaaaagggctggctctttctaacagccagtcagagtactcaaatctgagacaaaatgtaaaaattagcatagatcgattaacaattgttggagatttttcgacagagctttttaaaaaattagttcgtaaatggctgactttttcttttattagatcttcgggagctggttttgaggtattagattattcaaattgcaggtttgatgatttcggtaatccacatgaggaaattccgcctgggcttttaaaacgtgctgttttttcttgccggaataataagctgcttgtctttttttgggcgttgaatctttacttcagtggcatcgattaagacaacatcgtctggcttgatttcttgcttgccaatgttaaagccatgcttagccaaagtctcttcggcccagtggcttcttctgatcaggttgctgtcatgcacaccgtaatcggcagctatttgttcataagtacggtattccttgaggtactgcaaagtagccagaagcaggtcttcaattgccagcttgagctttctgccgcctcgggcatgcttgacttgatattcggcttttaatactttgaccatttcgtcaaagacaggcttggcaacgccgatcagacgcttgaatctggtattgtttaaatttttagctgtttcgtatttcataatttaagattatagcagatgtttcgcagtaactctattaactaaagaaacaaataatgaaaggcatggttggctttggaaaataacgcattagctaataacgtcaaaatacgctgaactgagtttgtcgaaataccggtgagactggcgatagtcttagccgggagtgatttactggctagcttcagcacatgagtcgctagtccgtgaccgatggcgtggttggttgataccactggagtggtggccgtacaagtgctatggcagttactacaacgccagcgttgcttgtttagctctagaattacgggccggtccatggatcctgcaatgtggacatgagtgagcttgtgtccgttagggtgcaacatattgtatccacagctgggacagcgcctgagtgtgtaggtaagctctgcctggatgaccaaatactttttgcgacccgagccccgaccatgaaattcctcacgagtaccgaacacccgaatgtttgtgtctgtaactcccagtaatttaagtgtattatctagttgagacatctattcctacccccgcttatcttgagtttcgtcgcttaaagcatagcactagggaggcttagatgcctttttttgttatcaaaaagggcctagtacttttggaatggaaatactttccaacaccaaaaattctagaccccctaaatttgcgatctaccacgtatgtttaaatcaaatttattttaaatataccttgtacagtgaagtttattgattgtgtgatttatgataaaagattaatcttttatcataaatcacacaatcagtaatacataagttaagctcaatcttatttacgtttggcaaggccttcacgaataattttttctaagacatcaacaatttttttgtcattctcaaaagcgatgcgtttaacttctttatatgtgctcatgcgaagttgaacggttttagttctttctgtttcgaattggtatggactttttagatttttaagttgttcagatgcctttttactaactttgtttaaaaaatcttctgccatgataaattactcctctaactgttgaattctaagtagttgttcattaagaaccatttggtacatttggattgctcttttatcccaatggtctttattccgtattccttcattagcaaacgttttaacccgttcttgagttctaattgagtttgaaaagaccccttcgccaaaaaagtcttttgcttgtgcagaaatttcagtatcaacttttgcacgtggcttcattaagtacaatatgacaccaactaactgaaaacttccattgtattgttcacgtagttcacctaaatgcgtagctgtttttaaagaacttgtatatgactgcttttgagtttgtaagacaattgagatgaaatctgaagccatgattgcgttattagtaaagacatttattgttggtggtacgtcaataaaaatataatcgtaattttgttttaattttgaaagcatttgtggtaatagaatattacgtttaacccgactaactttttctacagcaccaatccataaagacaatgtccaatctgtaggaatcatatcaatttggtttgtaacagacacaatagatttagacaaattccctccaagaaggccctcatataatgaaagttccggctttaaatcggctttataagtctccttcataatttcagttgcatttccctggggatcgaaatctatcagtagtacttttttcccctcttgacccaataaataggtttccattacagtcaaggtggtcttaccaacgccacctttaaagttgaagtttaatagtgttttcccattcatagtagcacctacctttacataaacattttaccatgatttatgattaatcgcaaattttatatgatttatgattaatcataaatcatatccatgaaaatatttacttaacctttgcagaatgatatgctttgttcataaacaaaaaatcccaatacactcgggattgggatttttgcagtattgacaagtagctatcttgcagctacctagtccaagcaattttcaccgccgagttaaaattgcttgaacaaattgtaatcttgtttacgtgctaattataccgcaagcaaaccttaaagggcaagcaaaggtaaactaattaaaacgaagacaagaccaatggactaagtagcttctaataactacttagtccatttttagttcttaaaaattaaaaaagttgccgactgggcaacccagaatagacacatgctggtgaaactacaaagccgatcacgaccaatatccgctttgtaattctattaaagcatatcagatttgtattttaaagcaagtcagatgttttagcaactctcttttgagacagcgtgtgtcagtcaagaaagggagtttttatt

(The sequence listing continues in the following parts.)
